United States Patent Application Publication US 2023/0340073 A1 - sequence listing, part 4

SEQ ID NO: 2531 - DNA, 4371 bp, synthetic construct
  misc_feature 1..4371: note = Variant of human B-domain deleted Factor VIII
  source 1..4371: mol_type = other DNA
atgcagattgaactgtctacctgcttcttcctctgtttgctgaggttctgctttagcgccactagacggtactaccttggcgctgtggagctgtcctgggactatatgcagagtgatttgggagagcttcccgtcgacgcacgatttcctcctcgcgttccaaagtcatttcccttcaacacaagcgtggtgtacaagaagacgctcttcgtcgaattcaccgatcacctgttcaatatcgccaaacccagaccaccatggatgggtcttttggggcctaccatacaagcggaggtgtatgacacagttgttatcactctcaagaacatggcttctcatccggtaagtcttcacgcagtgggcgtgtcctactggaaagcttcagaaggagccgagtatgatgatcagacatcccagagggagaaagaagacgacaaggtatttccaggtgggtctcatacctatgtgtggcaagtgctcaaagagaatggccctatggcaagcgatccgctctgtttgacttacagctacctttcacacgttgacctcgtcaaggacctcaactccgggttgattggagccttgttggtatgcagggaaggatctcttgccaaagagaagacacagaccctccacaagtttatccttctctttgctgtgttcgatgagggcaaaagttggcatagcgaaacgaagaattccctcatgcaggatcgcgacgcagccagcgccagagcttggcccaagatgcacactgtgaacggatatgtcaataggtcacttcctggcttgattgggtgtcatcggaaaagtgtctactggcacgtgatcggaatggggacaacaccagaggtccactccatatttctcgaaggccataccttccttgttcgaaaccacagacaggcatccttggagatctctcccattacctttctcactgcccaaacgctccttatggacttgggtcagttccttctcttctgccatatcagctcacaccagcatgatggtatggaagcttatgtgaaagtcgacagttgtcctgaggagccacagttgcgcatgaagaataatgaagaagccgaggattacgacgacgatctcaccgattctgagatggacgtggtgaggtttgatgacgacaactctccctccttcattcaaatccggagcgtggcgaagaaacaccccaagacttgggtccactatatagcggcggaagaggaggattgggattacgctcctcttgtattggcaccagatgaccgctcatacaaaagccagtacctcaacaacggaccgcagagaattggccggaagtataagaaagtgcgatttatggcctatacagacgaaacctttaagacaagggaggccatccagcatgagagtgggattttgggacctcttctttacggcgaagttggtgataccctcctcatcatcttcaagaatcaagcttctcgcccctataacatttacccacacgggatcactgacgttaggcctttgtatagcagaagacttcccaaaggcgtgaagcatctcaaagacttccccattttgccaggcgagatctttaagtacaaatggaccgtcacagtggaagatggaccgactaaatcagaccctcgatgccttacgcggtactattcctccttcgtgaatatggagagagatttggcaagcggactcataggaccactcctcatctgttacaaggaatctgtagaccagaggggtaaccagattatgagtgataaacgcaatgtgatcctttttagcgtcttcgacgagaaccggtcctggtacttgaccgagaatatacaaaggttccttcccaaccccgcaggcgttcagttggaagaccctgagtttcaggccagcaatattatgcactcaatcaacggctatgtgtttgatagtctccagctttctgtttgcctccatgaagtagcctattggtacatcttgtcaattggtgctcaaacagacttcctctccgtcttcttctccggctacacctttaagcacaagatggtgtatgaggacactctcacactctttccattttctggagaaaccgtgttcatgagcatggagaatccaggcctttggatcttgggttgccacaacagtgattttcgcaatcggggaatgactgctctcctcaaagtcagcagctgtgataagaacacaggcgactattacgaagattcttacgaggacataagtgcctacttgttgtccaagaataacgccattgagcccagatcattctcccagaatcctcccgtgcttaaaaggcatcagcgcgaaatcaccagaactactcttcagtctgaccaagaggagattgactatgacgacaccataagcgtggaaatgaagaaggtggatttcgatatctatgacgaagatgagaaccagtctccgcggagctttcagaagaagacgcgacactacttcattgcagcagtcgaaaggctttgggactacggtatgtcatcatcccctcatgtgttgcgcaatagagctcagagtggaagtgttccacagttcaagaaagtcgtctttcaagagtttacagatggcagcttcacacagcctctctatcggggcgagcttaacgaacatttgggactccttggtccctatatccgagccgaagtggaggacaacattatggttacctttaggaatcaagcctctcgcccctacagcttctactcctccctcatcagttatgaggaggatcagagacaaggcgctgaaccacggaagaactttgtgaaaccgaatgagacgaagacctacttctggaaagtacagcaccacatggcccccacaaaagacgaattcgattgcaaagcatgggcgtatttttcagacgttgacttggagaaagatgtacattcaggacttattggtcctttgttggtgtgtcacactaacactctcaatccagcccatggcaggcaggtgacagtccaggaattcgctcttttctttaccatctttgatgagaccaagtcctggtacttcacggaaaacatggagcgcaattgcagagccccctgtaacatacagatggaggaccctacctttaaggaaaattatcggttccacgcaatcaacggatacattatggatacactccctggccttgtgatggctcaggaccaacgaatcaggtggtacctcctcagcatgggttctaatgagaacatacactccattcacttttcaggacatgtgttcactgtccggaagaaagaagagtataagatggccctctacaatttgtatccaggcgtgtttgagaccgttgaaatgcttccctctaaagctggcatctggagagtagagtgcttgatcggagaacatcttcacgcaggtatgagcaccttgttcctcgtgtacagcaacaaatgtcagaccccacttggcatggccagtggacacattcgcgactttcagatcacagcatctggccagtatggacaatgggccccaaagttggctcgcctccattactccggtagcataaatgcgtggtccactaaagaacctttcagctggattaaggtcgatcttcttgcccccatgatcatccacggcattaagacacagggagcgaggcagaaattctcctccctctacatctcacagttcattattatgtatagtttggacggcaagaagtggcaaacttatagaggtaacagtactggaacactcatggtgttcttcggcaacgttgatagctctggcatcaaacacaacatctttaatcctcccataatagctcggtacatcagattgcatccgacccactacagcattaggagtacactccgaatggagcttatgggttgcgacttgaattcctgttcaatgccactcggaatggagtctaaagccatctctgatgcacagataaccgccagtagctactttacgaacatgtttgctacgtggtcaccctctaaggcaaggcttcatttgcaaggccggtctaatgcctggagacctcaggtgaacaacccgaaagaatggctccaggtggactttcagaagaccatgaaagtaacaggtgtcactactcagggagttaagtccttgctaaccagcatgtatgtgaaggagttccttatttcctcatcacaagatggccaccagtggaccctcttctttcagaatggtaaggtcaaagtgtttcagggcaatcaagacagcttcacacccgtggtgaacagtcttgatcctccactcttgacacgataccttcgaatccatccacagtcttgggttcaccagattgcattgcgcatggaagtacttggatgcgaggctcaggacctctac

SEQ ID NO: 2532 - protein, 1457 aa, synthetic construct
  REGION 1..1457: note = Variant of human B-domain deleted Factor VIII
MQIELSTCFFLCLLRFCFSATRRYYLGAVELSWDYMQSDLGELPVDARFPPRVPKSFPFNTSVVYKKTLFVEFTDHLFNIAKPRPPWMGLLGPTIQAEVYDTVVITLKNMASHPVSLHAVGVSYWKASEGAEYDDQTSQREKEDDKVFPGGSHTYVWQVLKENGPMASDPLCLTYSYLSHVDLVKDLNSGLIGALLVCREGSLAKEKTQTLHKFILLFAVFDEGKSWHSETKNSLMQDRDAASARAWPKMHTVNGYVNRSLPGLIGCHRKSVYWHVIGMGTTPEVHSIFLEGHTFLVRNHRQASLEISPITFLTAQTLLMDLGQFLLFCHISSHQHDGMEAYVKVDSCPEEPQLRMKNNEEAEDYDDDLTDSEMDVVRFDDDNSPSFIQIRSVAKKHPKTWVHYIAAEEEDWDYAPLVLAPDDRSYKSQYLNNGPQRIGRKYKKVRFMAYTDETFKTREAIQHESGILGPLLYGEVGDTLLIIFKNQASRPYNIYPHGITDVRPLYSRRLPKGVKHLKDFPILPGEIFKYKWTVTVEDGPTKSDPRCLTRYYSSFVNMERDLASGLIGPLLICYKESVDQRGNQIMSDKRNVILFSVFDENRSWYLTENIQRFLPNPAGVQLEDPEFQASNIMHSINGYVFDSLQLSVCLHEVAYWYILSIGAQTDFLSVFFSGYTFKHKMVYEDTLTLFPFSGETVFMSMENPGLWILGCHNSDFRNRGMTALLKVSSCDKNTGDYYEDSYEDISAYLLSKNNAIEPRSFSQNPPVLKRHQREITRTTLQSDQEEIDYDDTISVEMKKVDFDIYDEDENQSPRSFQKKTRHYFIAAVERLWDYGMSSSPHVLRNRAQSGSVPQFKKVVFQEFTDGSFTQPLYRGELNEHLGLLGPYIRAEVEDNIMVTFRNQASRPYSFYSSLISYEEDQRQGAEPRKNFVKPNETKTYFWKVQHHMAPTKDEFDCKAWAYFSDVDLEKDVHSGLIGPLLVCHTNTLNPAHGRQVTVQEFALFFTIFDETKSWYFTENMERNCRAPCNIQMEDPTFKENYRFHAINGYIMDTLPGLVMAQDQRIRWYLLSMGSNENIHSIHFSGHVFTVRKKEEYKMALYNLYPGVFETVEMLPSKAGIWRVECLIGEHLHAGMSTLFLVYSNKCQTPLGMASGHIRDFQITASGQYGQWAPKLARLHYSGSINAWSTKEPFSWIKVDLLAPMIIHGIKTQGARQKFSSLYISQFIIMYSLDGKKWQTYRGNSTGTLMVFFGNVDSSGIKHNIFNPPIIARYIRLHPTHYSIRSTLRMELMGCDLNSCSMPLGMESKAISDAQITASSYFTNMFATWSPSKARLHLQGRSNAWRPQVNNPKEWLQVDFQKTMKVTGVTTQGVKSLLTSMYVKEFLISSSQDGHQWTLFFQNGKVKVFQGNQDSFTPVVNSLDPPLLTRYLRIHPQSWVHQIALRMEVLGCEAQDLY

SEQ ID NO: 2533 - DNA, 4371 bp, synthetic construct
  misc_feature 1..4371: note = Variant of human B-domain deleted Factor VIII
  source 1..4371: mol_type = other DNA
atgcagattgaactgtctacctgcttcttcctctgtttgctgaggttctgctttagcgccactagacggtactaccttggcgctgtggagctgtcctgggactatatgcagagtgatttgggagagcttcccgtcgacgcacgatttcctcctcgcgttccaaagtcatttcccttcaacacaagcgtggtgtacaagaagacgctcttcgtcgaattcaccgatcacctgttcaatatcgccaaacccagaccaccatggatgggtcttttggggcctaccatacaagcggaggtgtatgacacagttgttatcactctcaagaacatggcttctcatccggtaagtcttcacgcagtgggcgtgtcctactggaaagcttcagaaggagccgagtatgatgatcagacatcccagagggagaaagaagacgacaaggtatttccaggtgggtctcatacctatgtgtggcaagtgctcaaagagaatggccctatggcaagcgatccgctctgtttgacttacagctacctttcacacgttgacctcgtcaaggacctcaactccgggttgattggagccttgttggtatgcagggaaggatctcttgccaaagagaagacacagaccctccacaagtttatccttctctttgctgtgttcgatgagggcaaaagttggcatagcgaaacgaagaattccctcatgcaggatcgcgacgcagccagcgccagagcttggcccaagatgcacactgtgaacggatatgtcaataggtcacttcctggcttgattgggtgtcatcggaaaagtgtctactggcacgtgatcggaatggggacaacaccagaggtccactccatatttctcgaaggccataccttccttgttcgaaaccacagacaggcatccttggagatctctcccattacctttctcactgcccaaacgctccttatggacttgggtcagttccttctcttctgccatatcagctcacaccagcatgatggtatggaagcttatgtgaaagtcgacagttgtcctgaggagccacagttgcgcatgaagaataatgaagaagccgaggattacgacgacgatctcaccgattctgagatggacgtggtgaggtttgatgacgacaactctccctccttcattcaaatccggagcgtggcgaagaaacaccccaagacttgggtccactatatagcggcggaagaggaggattgggattacgctcctcttgtattggcaccagatgaccgctcatacaaaagccagtacctcaacaacggaccgcagagaattggccggaagtataagaaagtgcgatttatggcctatacagacgaaacctttaagacaagggaggccatccagcatgagagtgggattttgggacctcttctttacggcgaagttggtgataccctcctcatcatcttcaagaatcaagcttctcgcccctataacatttacccacacgggatcactgacgttaggcctttgtatagcagaagacttcccaaaggcgtgaagcatctcaaagacttccccattttgccaggcgagatctttaagtacaaatggaccgtcacagtggaagatggaccgactaaatcagaccctcgatgccttacgcggtactattcctccttcgtgaatatggagagagatttggcaagcggactcataggaccactcctcatctgttacaaggaatctgtagaccagaggggtaaccagattatgagtgataaacgcaatgtgatcctttttagcgtcttcgacgagaaccggtcctggtacttgaccgagaatatacaaaggttccttcccaaccccgcaggcgttcagttggaagaccctgagtttcaggccagcaatattatgcactcaatcaacggctatgtgtttgatagtctccagctttctgtttgcctccatgaagtagcctattggtacatcttgtcaattggtgctcaaacagacttcctctccgtcttcttctccggctacacctttaagcacaagatggtgtatgaggacactctcacactctttccattttctggagaaaccgtgttcatgagcatggagaatccaggcctttggatcttgggttgccacaacagtgattttcgcaatcggggaatgactgctctcctcaaagtcagcagctgtgataagaacacaggcgactattacgaagattcttacgaggacataagtgcctacttgttgtccaagaataacgccattgagcccagatcattctcccagaatcctcccgtgcttaaaaggcatcagcgcgaaatcaccagaactactcttcagtctgatcaagaggagattgactatgacgacaccataagcgtggaaatgaagaaggaggatttcgatatctatgacgaagatgagaaccagtctccgcggagctttcagaagaagacgcgacactacttcattgcagcagtcgaaaggctttgggactacggtatgtcatcatcccctcatgtgttgcgcaatagagctcagagtggaagtgttccacagttcaagaaagtcgtctttcaagagtttacagatggcagcttcacacagcctctctatcggggcgagcttaacgaacatttgggactccttggtccctatatccgagccgaagtggaggacaacattatggttacctttaggaatcaagcctctcgcccctacagcttctactcctccctcatcagttatgaggaggatcagagacaaggcgctgaaccacggaagaactttgtgaaaccgaatgagacgaagacctacttctggaaagtacagcaccacatggcccccacaaaagacgaattcgattgcaaagcatgggcgtatttttcagacgttgacttggagaaagatgtacattcaggacttattggtcctttgttggtgtgtcacactaacactctcaatccagcccatggcaggcaggtgacagtccaggaattcgctcttttctttaccatctttgatgagaccaagtcctggtacttcacggaaaacatggagcgcaattgcagagccccctgtaacatacagatggaggaccctacctttaaggaaaattatcggttccacgcaatcaacggatacattatggatacactccctggccttgtgatggctcaggaccaacgaatcaggtggtacctcctcagcatgggttctaatgagaacatacactccattcacttttcaggacatgtgttcactgtccggaagaaagaagagtataagatggccctctacaatttgtatccaggcgtgtttgagaccgttgaaatgcttccctctaaagctggcatctggagagtagagtgcttgatcggagaacatcttcacgcaggtatgagcaccttgttcctcgtgtacagcaacaaatgtcagaccccacttggcatggccagtggacacattcgcgactttcagatcacagcatctggccagtatggacaatgggccccaaagttggctcgcctccattactccggtagcataaatgcgtggtccactaaagaacctttcagctggattaaggtcgatcttcttgcccccatgatcatccacggcattaagacacagggagcgaggcagaaattctcctccctctacatctcacagttcattattatgtatagtttggacggcaagaagtggcaaacttatagaggtaacagtactggaacactcatggtgttcttcggcaacgttgatagctctggcatcaaacacaacatctttaatcctcccataatagctcggtacatcagattgcatccgacccactacagcattaggagtacactccgaatggagcttatgggttgcgacttgaattcctgttcaatgccactcggaatggagtctaaagccatctctgatgcacagataaccgccagtagctactttacgaacatgtttgctacgtggtcaccctctaaggcaaggcttcatttgcaaggccggtctaatgcctggagacctcaggtgaacaacccgaaagaatggctccaggtggactttcagaagaccatgaaagtaacaggtgtcactactcagggagttaagtccttgatgaccagcatgtatgtgaaggagttccttatttcctcatcacaagatggccaccagtggaccctcttctttcagaatggtaaggtcaaagtgtttcagggcaatcaagacagcttcacacccgtggtgaacagtcttgatcctccactcttgacacgataccttcgaatccatccacagtcttgggttcaccagattgcattgcgcatggaagtacttggatgcgaggctcaggacctctac

SEQ ID NO: 2534 - protein, 1457 aa, synthetic construct
  REGION 1..1457: note = Variant of human B-domain deleted Factor VIII
MQIELSTCFFLCLLRFCFSATRRYYLGAVELSWDYMQSDLGELPVDARFPPRVPKSFPFNTSVVYKKTLFVEFTDHLFNIAKPRPPWMGLLGPTIQAEVYDTVVITLKNMASHPVSLHAVGVSYWKASEGAEYDDQTSQREKEDDKVFPGGSHTYVWQVLKENGPMASDPLCLTYSYLSHVDLVKDLNSGLIGALLVCREGSLAKEKTQTLHKFILLFAVFDEGKSWHSETKNSLMQDRDAASARAWPKMHTVNGYVNRSLPGLIGCHRKSVYWHVIGMGTTPEVHSIFLEGHTFLVRNHRQASLEISPITFLTAQTLLMDLGQFLLFCHISSHQHDGMEAYVKVDSCPEEPQLRMKNNEEAEDYDDDLTDSEMDVVRFDDDNSPSFIQIRSVAKKHPKTWVHYIAAEEEDWDYAPLVLAPDDRSYKSQYLNNGPQRIGRKYKKVRFMAYTDETFKTREAIQHESGILGPLLYGEVGDTLLIIFKNQASRPYNIYPHGITDVRPLYSRRLPKGVKHLKDFPILPGEIFKYKWTVTVEDGPTKSDPRCLTRYYSSFVNMERDLASGLIGPLLICYKESVDQRGNQIMSDKRNVILFSVFDENRSWYLTENIQRFLPNPAGVQLEDPEFQASNIMHSINGYVFDSLQLSVCLHEVAYWYILSIGAQTDFLSVFFSGYTFKHKMVYEDTLTLFPFSGETVFMSMENPGLWILGCHNSDFRNRGMTALLKVSSCDKNTGDYYEDSYEDISAYLLSKNNAIEPRSFSQNPPVLKRHQREITRTTLQSDQEEIDYDDTISVEMKKEDFDIYDEDENQSPRSFQKKTRHYFIAAVERLWDYGMSSSPHVLRNRAQSGSVPQFKKVVFQEFTDGSFTQPLYRGELNEHLGLLGPYIRAEVEDNIMVTFRNQASRPYSFYSSLISYEEDQRQGAEPRKNFVKPNETKTYFWKVQHHMAPTKDEFDCKAWAYFSDVDLEKDVHSGLIGPLLVCHTNTLNPAHGRQVTVQEFALFFTIFDETKSWYFTENMERNCRAPCNIQMEDPTFKENYRFHAINGYIMDTLPGLVMAQDQRIRWYLLSMGSNENIHSIHFSGHVFTVRKKEEYKMALYNLYPGVFETVEMLPSKAGIWRVECLIGEHLHAGMSTLFLVYSNKCQTPLGMASGHIRDFQITASGQYGQWAPKLARLHYSGSINAWSTKEPFSWIKVDLLAPMIIHGIKTQGARQKFSSLYISQFIIMYSLDGKKWQTYRGNSTGTLMVFFGNVDSSGIKHNIFNPPIIARYIRLHPTHYSIRSTLRMELMGCDLNSCSMPLGMESKAISDAQITASSYFTNMFATWSPSKARLHLQGRSNAWRPQVNNPKEWLQVDFQKTMKVTGVTTQGVKSLMTSMYVKEFLISSSQDGHQWTLFFQNGKVKVFQGNQDSFTPVVNSLDPPLLTRYLRIHPQSWVHQIALRMEVLGCEAQDLY

SEQ ID NO: 2535 - DNA, 4371 bp, synthetic construct
  misc_feature 1..4371: note = Variant of human B-domain deleted Factor VIII
  source 1..4371: mol_type = other DNA
atgcagattgaactgtctacctgcttcttcctctgtttgctgaggttctgctttagcgccactagacggtactaccttggcgctgtggagctgtcctgggactatatgcagagtgatttgggagagcttcccgtcgacgcacgatttcctcctcgcgttccaaagtcatttcccttcaacacaagcgtggtgtacaagaagacgctcttcgtcgaattcaccgatcacctgttcaatatcgccaaacccagaccaccatggatgggtcttttggggcctaccatacaagcggaggtgtatgacacagttgttatcactctcaagaacatggcttctcatccggtaagtcttcacgcagtgggcgtgtcctactggaaagcttcagaaggagccgagtatgatgatcagacatcccagagggagaaagaagacgacaaggtatttccaggtgggtctcatacctatgtgtggcaagtgctcaaagagaatggccctatggcaagcgatccgctctgtttgacttacagctacctttcacacgttgacctcgtcaaggacctcaactccgggttgattggagccttgttggtatgcagggaaggatctcttgccaaagagaagacacagaccctccacaagtttatccttctctttgctgtgttcgatgagggcaaaagttggcatagcgaaacgaagaattccctcatgcaggatcgcgacgcagccagcgccagagcttggcccaagatgcacactgtgaacggatatgtcaataggtcacttcctggcttgattgggtgtcatcggaaaagtgtctactggcacgtgatcggaatggggacaacaccagaggtccactccatatttctcgaaggccataccttccttgttcgaaaccacagacaggcatccttggagatctctcccattacctttctcactgcccaaacgctccttatggacttgggtcagttccttctcttctgccatatcagctcacaccagcatgatggtatggaagcttatgtgaaagtcgacagttgtcctgaggagccacagttgcgcatgaagaataatgaagaagccgaggattacgacgacgatctcaccgattctgagatggacgtggtgaggtttgatgacgacaactctccctccttcattcaaatccggagcgtggcgaagaaacaccccaagacttgggtccactatatagcggcggaagaggaggattgggattacgctcctcttgtattggcaccagatgaccgctcatacaaaagccagtacctcaacaacggaccgcagagaattggccggaagtataagaaagtgcgatttatggcctatacagacgaaacctttaagacaagggaggccatccagcatgagagtgggattttgggacctcttctttacggcgaagttggtgataccctcctcatcatcttcaagaatcaagcttctcgcccctataacatttacccacacgggatcactgacgttaggcctttgtatagcagaagacttcccaaaggcgtgaagcatctcaaagacttccccattttgccaggcgagatctttaagtacaaatggaccgtcacagtggaagatggaccgactaaatcagaccctcgatgccttacgcggtactattcctccttcgtgaatatggagagagatttggcaagcggactcataggaccactcctcatctgttacaaggaatctgtagaccagaggggtaaccagattatgagtgataaacgcaatgtgatcctttttagcgtcttcgacgagaaccggtcctggtacttgaccgagaatatacaaaggttccttcccaaccccgcaggcgttcagttggaagaccctgagtttcaggccagcaatattatgcactcaatcaacggctatgtgtttgatagtctccagctttctgtttgcctccatgaagtagcctattggtacatcttgtcaattggtgctcaaacagacttcctctccgtcttcttctccggctacacctttaagcacaagatggtgtatgaggacactctcacactctttccattttctggagaaaccgtgttcatgagcatggagaatccaggcctttggatcttgggttgccacaacagtgattttcgcaatcggggaatgactgctctcctcaaagtcagcagctgtgataagaacacaggcgactattacgaagattcttacgaggacataagtgcctacttgttgtccaagaataacgccattgagcccagatcattctcccagaatcctcccgtgcttaaaaggcatcagcgcgaaatcaccagaactactcttcagtctgatcaagaggagattgactatgacgacaccataagcgtggaaatgaagaagtgggatttcgatatctatgacgaagatgagaaccagtctccgcggagctttcagaagaagacgcgacactacttcattgcagcagtcgaaaggctttgggactacggtatgtcatcatcccctcatgtgttgcgcaatagagctcagagtggaagtgttccacagttcaagaaagtcgtctttcaagagtttacagatggcagcttcacacagcctctctatcggggcgagcttaacgaacatttgggactccttggtccctatatccgagccgaagtggaggacaacattatggttacctttaggaatcaagcctctcgcccctacagcttctactcctccctcatcagttatgaggaggatcagagacaaggcgctgaaccacggaagaactttgtgaaaccgaatgagacgaagacctacttctggaaagtacagcaccacatggcccccacaaaagacgaattcgattgcaaagcatgggcgtatttttcagacgttgacttggagaaagatgtacattcaggacttattggtcctttgttggtgtgtcacactaacactctcaatccagcccatggcaggcaggtgacagtccaggaattcgctcttttctttaccatctttgatgagaccaagtcctggtacttcacggaaaacatggagcgcaattgcagagccccctgtaacatacagatggaggaccctacctttaaggaaaattatcggttccacgcaatcaacggatacattatggatacactccctggccttgtgatggctcaggaccaacgaatcaggtggtacctcctcagcatgggttctaatgagaacatacactccattcacttttcaggacatgtgttcactgtccggaagaaagaagagtataagatggccctctacaatttgtatccaggcgtgtttgagaccgttgaaatgcttccctctaaagctggcatctggagagtagagtgcttgatcggagaacatcttcacgcaggtatgagcaccttgttcctcgtgtacagcaacaaatgtcagaccccacttggcatggccagtggacacattcgcgactttcagatcacagcatctggccagtatggacaatgggccccaaagttggctcgcctccattactccggtagcataaatgcgtggtccactaaagaacctttcagctggattaaggtcgatcttcttgcccccatgatcatccacggcattaagacacagggagcgaggcagaaattctcctccctctacatctcacagttcattattatgtatagtttggacggcaagaagtggcaaacttatagaggtaacagtactggaacactcatggtgttcttcggcaacgttgatagctctggcatcaaacacaacatctttaatcctcccataatagctcggtacatcagattgcatccgacccactacagcattaggagtacactccgaatggagcttatgggttgcgacttgaattcctgttcaatgccactcggaatggagtctaaagccatctctgatgcacagataaccgccagtagctactttacgaacatgtttgctacgtggtcaccctctaaggcaaggcttcatttgcaaggccggtctaatgcctggagacctcaggtgaacaacccgaaagaatggctccaggtggactttcagaagaccatgaaagtaacaggtgtcactactcagggagttaagtccttgctcaccagcatgtatgtgaaggagttccttatttcctcatcacaagatggccaccagtggaccctcttctttcagaatggtaaggtcaaagtgtttcagggcaatcaagacagcttcacacccgtggtgaacagtcttgatcctccactcttgacacgataccttcgaatccatccacagtcttgggttcaccagattgcattgcgcatggaagtacttggatgcgaggctcaggacctctac

SEQ ID NO: 2536 - protein, 1457 aa, synthetic construct
  REGION 1..1457: note = Variant of human B-domain deleted Factor VIII
MQIELSTCFFLCLLRFCFSATRRYYLGAVELSWDYMQSDLGELPVDARFPPRVPKSFPFNTSVVYKKTLFVEFTDHLFNIAKPRPPWMGLLGPTIQAEVYDTVVITLKNMASHPVSLHAVGVSYWKASEGAEYDDQTSQREKEDDKVFPGGSHTYVWQVLKENGPMASDPLCLTYSYLSHVDLVKDLNSGLIGALLVCREGSLAKEKTQTLHKFILLFAVFDEGKSWHSETKNSLMQDRDAASARAWPKMHTVNGYVNRSLPGLIGCHRKSVYWHVIGMGTTPEVHSIFLEGHTFLVRNHRQASLEISPITFLTAQTLLMDLGQFLLFCHISSHQHDGMEAYVKVDSCPEEPQLRMKNNEEAEDYDDDLTDSEMDVVRFDDDNSPSFIQIRSVAKKHPKTWVHYIAAEEEDWDYAPLVLAPDDRSYKSQYLNNGPQRIGRKYKKVRFMAYTDETFKTREAIQHESGILGPLLYGEVGDTLLIIFKNQASRPYNIYPHGITDVRPLYSRRLPKGVKHLKDFPILPGEIFKYKWTVTVEDGPTKSDPRCLTRYYSSFVNMERDLASGLIGPLLICYKESVDQRGNQIMSDKRNVILFSVFDENRSWYLTENIQRFLPNPAGVQLEDPEFQASNIMHSINGYVFDSLQLSVCLHEVAYWYILSIGAQTDFLSVFFSGYTFKHKMVYEDTLTLFPFSGETVFMSMENPGLWILGCHNSDFRNRGMTALLKVSSCDKNTGDYYEDSYEDISAYLLSKNNAIEPRSFSQNPPVLKRHQREITRTTLQSDQEEIDYDDTISVEMKKWDFDIYDEDENQSPRSFQKKTRHYFIAAVERLWDYGMSSSPHVLRNRAQSGSVPQFKKVVFQEFTDGSFTQPLYRGELNEHLGLLGPYIRAEVEDNIMVTFRNQASRPYSFYSSLISYEEDQRQGAEPRKNFVKPNETKTYFWKVQHHMAPTKDEFDCKAWAYFSDVDLEKDVHSGLIGPLLVCHTNTLNPAHGRQVTVQEFALFFTIFDETKSWYFTENMERNCRAPCNIQMEDPTFKENYRFHAINGYIMDTLPGLVMAQDQRIRWYLLSMGSNENIHSIHFSGHVFTVRKKEEYKMALYNLYPGVFETVEMLPSKAGIWRVECLIGEHLHAGMSTLFLVYSNKCQTPLGMASGHIRDFQITASGQYGQWAPKLARLHYSGSINAWSTKEPFSWIKVDLLAPMIIHGIKTQGARQKFSSLYISQFIIMYSLDGKKWQTYRGNSTGTLMVFFGNVDSSGIKHNIFNPPIIARYIRLHPTHYSIRSTLRMELMGCDLNSCSMPLGMESKAISDAQITASSYFTNMFATWSPSKARLHLQGRSNAWRPQVNNPKEWLQVDFQKTMKVTGVTTQGVKSLLTSMYVKEFLISSSQDGHQWTLFFQNGKVKVFQGNQDSFTPVVNSLDPPLLTRYLRIHPQSWVHQIALRMEVLGCEAQDLY

SEQ ID NO: 2537 - DNA, 4371 bp, synthetic construct
  misc_feature 1..4371: note = Variant of human B-domain deleted Factor VIII
  source 1..4371: mol_type = other DNA
atgcagattgaactgtctacctgcttcttcctctgtttgctgaggttctgctttagcgccactagacggtactaccttggcgctgtggagctgtcctgggactatatgcagagtgatttgggagagcttcccgtcgacgcacgatttcctcctcgcgttccaaagtcatttcccttcaacacaagcgtggtgtacaagaagacgctcttcgtcgaattcaccgatcacctgttcaatatcgccaaacccagaccaccatggatgggtcttttggggcctaccatacaagcggaggtgtatgacacagttgttatcactctcaagaacatggcttctcatccggtaagtcttcacgcagtgggcgtgtcctactggaaagcttcagaaggagccgagtatgatgatcagacatcccagagggagaaagaagacgacaaggtatttccaggtgggtctcatacctatgtgtggcaagtgctcaaagagaatggccctatggcaagcgatccgctctgtttgacttacagctacctttcacacgttgacctcgtcaaggacctcaactccgggttgattggagccttgttggtatgcagggaaggatctcttgccaaagagaagacacagaccctccacaagtttatccttctctttgctgtgttcgatgagggcaaaagttggcatagcgaaacgaagaattccctcatgcaggatcgcgacgcagccagcgccagagcttggcccaagatgcacactgtgaacggatatgtcaataggtcacttcctggcttgattgggtgtcatcggaaaagtgtctactggcacgtgatcggaatggggacaacaccagaggtccactccatatttctcgaaggccataccttccttgttcgaaaccacagacaggcatccttggagatctctcccattacctttctcactgcccaaacgctccttatggacttgggtcagttccttctcttctgccatatcagctcacaccagcatgatggtatggaagcttatgtgaaagtcgacagttgtcctgaggagccacagttgcgcatgaagaataatgaagaagccgaggattacgacgacgatctcaccgattctgagatggacgtggtgaggtttgatgacgacaactctccctccttcattcaaatccggagcgtggcgaagaaacaccccaagacttgggtccactatatagcggcggaagaggaggattgggattacgctcctcttgtattggcaccagatgaccgctcatacaaaagccagtacctcaacaacggaccgcagagaattggccggaagtataagaaagtgcgatttatggcctatacagacgaaacctttaagacaagggaggccatccagcatgagagtgggattttgggacctcttctttacggcgaagttggtgataccctcctcatcatcttcaagaatcaagcttctcgcccctataacatttacccacacgggatcactgacgttaggcctttgtatagcagaagacttcccaaaggcgtgaagcatctcaaagacttccccattttgccaggcgagatctttaagtacaaatggaccgtcacagtggaagatggaccgactaaatcagaccctcgatgccttacgcggtactattcctccttcgtgaatatggagagagatttggcaagcggactcataggaccactcctcatctgttacaaggaatctgtagaccagaggggtaaccagattatgagtgataaacgcaatgtgatcctttttagcgtcttcgacgagaaccggtcctggtacttgaccgagaatatacaaaggttccttcccaaccccgcaggcgttcagttggaagaccctgagtttcaggccagcaatattatgcactcaatcaacggctatgtgtttgatagtctccagctttctgtttgcctccatgaagtagcctattggtacatcttgtcaattggtgctcaaacagacttcctctccgtcttcttctccggctacacctttaagcacaagatggtgtatgaggacactctcacactctttccattttctggagaaaccgtgttcatgagcatggagaatccaggcctttggatcttgggttgccacaacagtgattttcgcaatcggggaatgactgctctcctcaaagtcagcagctgtgataagaacacaggcgactattacgaagattcttacgaggacataagtgcctacttgttgtccaagaataacgccattgagcccagatcattctcccagaatcctcccgtgcttaaaaggcatcagcgcgaaatcaccagaactactcttcagtctgatcaagaggagattgactatgacgacaccataagcgtggaaatgaagaaggaggatttcgatatctatgacgaagattgtaaccagtctccgcggagctttcagaagaagacgcgacactacttcattgcagcagtcgaaaggctttgggactacggtatgtcatcatcccctcatgtgttgcgcaatagagctcagagtggaagtgttccacagttcaagaaagtcgtctttcaagagtttacagatggcagcttcacacagcctctctatcggggcgagcttaacgaacatttgggactccttggtccctatatccgagccgaagtggaggacaacattatggttacctttaggaatcaagcctctcgcccctacagcttctactcctccctcatcagttatgaggaggatcagagacaaggcgctgaaccacggaagaactttgtgaaaccgaatgagacgaagacctacttctggaaagtacagcaccacatggcccccacaaaagacgaattcgattgcaaagcatgggcgtatttttcagacgttgacttggagaaagatgtacattcaggacttattggtcctttgttggtgtgtcacactaacactctcaatccagcccatggcaggcaggtgacagtccaggaattcgctcttttctttaccatctttgatgagaccaagtcctggtacttcacggaaaacatggagcgcaattgcagagccccctgtaacatacagatggaggaccctacctttaaggaaaattatcggttccacgcaatcaacggatacattatggatacactccctggccttgtgatggctcaggaccaacgaatcaggtggtacctcctcagcatgggttctaatgagaacatacactccattcacttttcaggacatgtgttcactgtccggaagaaagaagagtataagatggccctctacaatttgtatccaggcgtgtttgagaccgttgaaatgcttccctctaaagctggcatctggagagtagagtgcttgatcggagaacatcttcacgcaggtatgagcaccttgttcctcgtgtacagcaacaaatgtcagaccccacttggcatggccagtggacacattcgcgactttcagatcacagcatctggccagtatggacaatgggccccaaagttggctcgcctccattactccggtagcataaatgcgtggtccactaaagaacctttcagctggattaaggtcgatcttcttgcccccatgatcatccacggcattaagacacagggagcgaggcagaaattctcctccctctacatctcacagttcattattatgtatagtttggacggcaagaagtggcaaacttatagaggtaacagtactggaacactcatggtgttcttcggcaacgttgatagctctggcatcaaacacaacatctttaatcctcccataatagctcggtacatcagattgcatccgacccactacagcattaggagtacactccgaatggagcttatgggttgcgacttgaattcctgttcaatgccactcggaatggagtctaaagccatctctgatgcacagataaccgccagtagctactttacgaacatgtttgctacgtggtcaccctctaaggcaaggcttcatttgcaaggccggtctaatgcctggagacctcaggtgaacaacccgaaagaatggctccaggtggactttcagaagaccatgaaagtaacaggtgtcactactcagggagttaagtccttgctcaccagcatgtatgtgaaggagttccttatttcctcatcacaagatggccaccagtggaccctcttctttcagaatggtaaggtcaaagtgtttcagggcaatcaagacagcttcacacccgtggtgaacagtcttgatcctccactcttgacacgataccttcgaatccatccacagtcttgggttcaccagattgcattgcgcatggaagtacttggatgcgaggctcaggacctctac

SEQ ID NO: 2538 - protein, 1457 aa, synthetic construct
  REGION 1..1457: note = Variant of human B-domain deleted Factor VIII
MQIELSTCFFLCLLRFCFSATRRYYLGAVELSWDYMQSDLGELPVDARFPPRVPKSFPFNTSVVYKKTLFVEFTDHLFNIAKPRPPWMGLLGPTIQAEVYDTVVITLKNMASHPVSLHAVGVSYWKASEGAEYDDQTSQREKEDDKVFPGGSHTYVWQVLKENGPMASDPLCLTYSYLSHVDLVKDLNSGLIGALLVCREGSLAKEKTQTLHKFILLFAVFDEGKSWHSETKNSLMQDRDAASARAWPKMHTVNGYVNRSLPGLIGCHRKSVYWHVIGMGTTPEVHSIFLEGHTFLVRNHRQASLEISPITFLTAQTLLMDLGQFLLFCHISSHQHDGMEAYVKVDSCPEEPQLRMKNNEEAEDYDDDLTDSEMDVVRFDDDNSPSFIQIRSVAKKHPKTWVHYIAAEEEDWDYAPLVLAPDDRSYKSQYLNNGPQRIGRKYKKVRFMAYTDETFKTREAIQHESGILGPLLYGEVGDTLLIIFKNQASRPYNIYPHGITDVRPLYSRRLPKGVKHLKDFPILPGEIFKYKWTVTVEDGPTKSDPRCLTRYYSSFVNMERDLASGLIGPLLICYKESVDQRGNQIMSDKRNVILFSVFDENRSWYLTENIQRFLPNPAGVQLEDPEFQASNIMHSINGYVFDSLQLSVCLHEVAYWYILSIGAQTDFLSVFFSGYTFKHKMVYEDTLTLFPFSGETVFMSMENPGLWILGCHNSDFRNRGMTALLKVSSCDKNTGDYYEDSYEDISAYLLSKNNAIEPRSFSQNPPVLKRHQREITRTTLQSDQEEIDYDDTISVEMKKEDFDIYDEDCNQSPRSFQKKTRHYFIAAVERLWDYGMSSSPHVLRNRAQSGSVPQFKKVVFQEFTDGSFTQPLYRGELNEHLGLLGPYIRAEVEDNIMVTFRNQASRPYSFYSSLISYEEDQRQGAEPRKNFVKPNETKTYFWKVQHHMAPTKDEFDCKAWAYFSDVDLEKDVHSGLIGPLLVCHTNTLNPAHGRQVTVQEFALFFTIFDETKSWYFTENMERNCRAPCNIQMEDPTFKENYRFHAINGYIMDTLPGLVMAQDQRIRWYLLSMGSNENIHSIHFSGHVFTVRKKEEYKMALYNLYPGVFETVEMLPSKAGIWRVECLIGEHLHAGMSTLFLVYSNKCQTPLGMASGHIRDFQITASGQYGQWAPKLARLHYSGSINAWSTKEPFSWIKVDLLAPMIIHGIKTQGARQKFSSLYISQFIIMYSLDGKKWQTYRGNSTGTLMVFFGNVDSSGIKHNIFNPPIIARYIRLHPTHYSIRSTLRMELMGCDLNSCSMPLGMESKAISDAQITASSYFTNMFATWSPSKARLHLQGRSNAWRPQVNNPKEWLQVDFQKTMKVTGVTTQGVKSLLTSMYVKEFLISSSQDGHQWTLFFQNGKVKVFQGNQDSFTPVVNSLDPPLLTRYLRIHPQSWVHQIALRMEVLGCEAQDLY

SEQ ID NO: 2539 - DNA, 4371 bp, synthetic construct
  misc_feature 1..4371: note = Variant of human B-domain deleted Factor VIII
  source 1..4371: mol_type = other DNA
atgcagattgaactgtctacctgcttcttcctctgtttgctgaggttctgctttagcgccactagacggtactaccttggcgctgtggagctgtcctgggactatatgcagagtgatttgggagagcttcccgtcgacgcacgatttcctcctcgcgttccaaagtcatttcccttcaacacaagcgtggtgtacaagaagacgctcttcgtcgaattcaccgatcacctgttcaatatcgccaaacccagaccaccatggatgggtcttttggggcctaccatacaagcggaggtgtatgacacagttgttatcactctcaagaacatggcttctcatccggtaagtcttcacgcagtgggcgtgtcctactggaaagcttcagaaggagccgagtatgatgatcagacatcccagagggagaaagaagacgacaaggtatttccaggtgggtctcatacctatgtgtggcaagtgctcaaagagaatggccctatggcaagcgatccgctctgtttgacttacagctacctttcacacgttgacctcgtcaaggacctcaactccgggttgattggagccttgttggtatgcagggaaggatctcttgccaaagagaagacacagaccctccacaagtttatccttctctttgctgtgttcgatgagggcaaaagttggcatagcgaaacgaagaattccctcatgcaggatcgcgacgcagccagcgccagagcttggcccaagatgcacactgtgaacggatatgtcaataggtcacttcctggcttgattgggtgtcatcggaaaagtgtctactggcacgtgatcggaatggggacaacaccagaggtccactccatatttctcgaaggccataccttccttgttcgaaaccacagacaggcatccttggagatctctcccattacctttctcactgcccaaacgctccttatggacttgggtcagttccttctcttctgccatatcagctcacaccagcatgatggtatggaagcttatgtgaaagtcgacagttgtcctgaggagccacagttgcgcatgaagaataatgaagaagccgaggattacgacgacgatctcaccgattctgagatggacgtggtgaggtttgatgacgacaactctccctccttcattcaaatccggagcgtggcgaagaaacaccccaagacttgggtccactatatagcggcggaagaggaggattgggattacgctcctcttgtattggcaccagatgaccgctcatacaaaagccagtacctcaacaacggaccgcagagaattggccggaagtataagaaagtgcgatttatggcctatacagacgaaacctttaagacaagggaggccatccagcatgagagtgggattttgggacctcttctttacggcgaagttggtgataccctcctcatcatcttcaagaatcaagcttctcgcccctataacatttacccacacgggatcactgacgttaggcctttgtatagcagaagacttcccaaaggcgtgaagcatctcaaagacttccccattttgccaggcgagatctttaagtacaaatggaccgtcacagtggaagatggaccgactaaatcagaccctcgatgccttacgcggtactattcctccttcgtgaatatggagagagatttggcaagcggactcataggaccactcctcatctgttacaaggaatctgtagaccagaggggtaaccagattatgagtgataaacgcaatgtgatcctttttagcgtcttcgacgagaaccggtcctggtacttgaccgagaatatacaaaggttccttcccaaccccgcaggcgttcagttggaagaccctgagtttcaggccagcaatattatgcactcaatcaacggctatgtgtttgatagtctccagctttctgtttgcctccatgaagtagcctattggtacatcttgtcaattggtgctcaaacagacttcctctccgtcttcttctccggctacacctttaagcacaagatggtgtatgaggacactctcacactctttccattttctggagaaaccgtgttcatgagcatggagaatccaggcctttggatcttgggttgccacaacagtgattttcgcaatcggggaatgactgctctcctcaaagtcagcagctgtgataagaacacaggcgactatgaggaagattcttacgaggacataagtgcctacttgttgtccaagaataacgccattgagcccagatcattctcccagaatcctcccgtgcttaaaaggcatcagcgcgaaatcaccagaactactcttcagtctgatcaagaggagattgactatgacgacaccataagcgtggaaatgaagaaggaggatttcgatatctatgacgaagatgagaaccagtctccgcggagctttcagaagaagacgcgacactacttcattgcagcagtcgaaaggctttgggactacggtatgtcatcatcccctcatgtgttgcgcaatagagctcagagtggaagtgttccacagttcaagaaagtcgtctttcaagagtttacagatggcagcttcacacagcctctctatcggggcgagcttaacgaacatttgggactccttggtccctatatccgagccgaagtggaggacaacattatggttacctttaggaatcaagcctctcgcccctacagcttctactcctccctcatcagttatgaggaggatcagagacaaggcgctgaaccacggaagaactttgtgaaaccgaatgagacgaagacctacttctggaaagtacagcaccacatggcccccacaaaagacgaattcgattgcaaagcatgggcgtatttttcagacgttgacttggagaaagatgtacattcaggacttattggtcctttgttggtgtgtcacactaacactctcaatccagcccatggcaggcaggtgacagtccaggaattcgctcttttctttaccatctttgatgagaccaagtcctggtacttcacggaaaacatggagcgcaattgcagagccccctgtaacatacagatggaggaccctacctttaaggaaaattatcggttccacgcaatcaacggatacattatggatacactccctggccttgtgatggctcaggaccaacgaatcaggtggtacctcctcagcatgggttctaatgagaacatacactccattcacttttcaggacatgtgttcactgtccggaagaaagaagagtataagatggccctctacaatttgtatccaggcgtgtttgagaccgttgaaatgcttccctctaaagctggcatctggagagtagagtgcttgatcggagaacatcttcacgcaggtatgagcaccttgttcctcgtgtacagcaacaaatgtcagaccccacttggcatggccagtggacacattcgcgactttcagatcacagcatctggccagtatggacaatgggccccaaagttggctcgcctccattactccggtagcataaatgcgtggtccactaaagaacctttcagctggattaaggtcgatcttcttgcccccatgatcatccacggcattaagacacagggagcgaggcagaaattctcctccctctacatctcacagttcattattatgtatagtttggacggcaagaagtggcaaacttatagaggtaacagtactggaacactcatggtgttcttcggcaacgttgatagctctggcatcaaacacaacatctttaatcctcccataatagctcggtacatcagattgcatccgacccactacagcattaggagtacactccgaatggagcttatgggttgcgacttgaattcctgttcaatgccactcggaatggagtctaaagccatctctgatgcacagataaccgccagtagctactttacgaacatgtttgctacgtggtcaccctctaaggcaaggcttcatttgcaaggccggtctaatgcctggagacctcaggtgaacaacccgaaagaatggctccaggtggactttcagaagaccatgaaagtaacaggtgtcactactcagggagttaagtccttgctcaccagcatgtatgtgaaggagttccttatttcctcatcacaagatggccaccagtggaccctcttctttcagaatggtaaggtcaaagtgtttcagggcaatcaagacagcttcacacccgtggtgaacagtcttgatcctccactcttgacacgataccttcgaatccatccacagtcttgggttcaccagattgcattgcgcatggaagtacttggatgcgaggctcaggacctctac

SEQ ID NO: 2540 - protein, 1457 aa, synthetic construct
  REGION 1..1457: note = Variant of human B-domain deleted Factor VIII
MQIELSTCFFLCLLRFCFSATRRYYLGAVELSWDYMQSDLGELPVDARFPPRVPKSFPFNTSVVYKKTLFVEFTDHLFNIAKPRPPWMGLLGPTIQAEVYDTVVITLKNMASHPVSLHAVGVSYWKASEGAEYDDQTSQREKEDDKVFPGGSHTYVWQVLKENGPMASDPLCLTYSYLSHVDLVKDLNSGLIGALLVCREGSLAKEKTQTLHKFILLFAVFDEGKSWHSETKNSLMQDRDAASARAWPKMHTVNGYVNRSLPGLIGCHRKSVYWHVIGMGTTPEVHSIFLEGHTFLVRNHRQASLEISPITFLTAQTLLMDLGQFLLFCHISSHQHDGMEAYVKVDSCPEEPQLRMKNNEEAEDYDDDLTDSEMDVVRFDDDNSPSFIQIRSVAKKHPKTWVHYIAAEEEDWDYAPLVLAPDDRSYKSQYLNNGPQRIGRKYKKVRFMAYTDETFKTREAIQHESGILGPLLYGEVGDTLLIIFKNQASRPYNIYPHGITDVRPLYSRRLPKGVKHLKDFPILPGEIFKYKWTVTVEDGPTKSDPRCLTRYYSSFVNMERDLASGLIGPLLICYKESVDQRGNQIMSDKRNVILFSVFDENRSWYLTENIQRFLPNPAGVQLEDPEFQASNIMHSINGYVFDSLQLSVCLHEVAYWYILSIGAQTDFLSVFFSGYTFKHKMVYEDTLTLFPFSGETVFMSMENPGLWILGCHNSDFRNRGMTALLKVSSCDKNTGDYEEDSYEDISAYLLSKNNAIEPRSFSQNPPVLKRHQREITRTTLQSDQEEIDYDDTISVEMKKEDFDIYDEDENQSPRSFQKKTRHYFIAAVERLWDYGMSSSPHVLRNRAQSGSVPQFKKVVFQEFTDGSFTQPLYRGELNEHLGLLGPYIRAEVEDNIMVTFRNQASRPYSFYSSLISYEEDQRQGAEPRKNFVKPNETKTYFWKVQHHMAPTKDEFDCKAWAYFSDVDLEKDVHSGLIGPLLVCHTNTLNPAHGRQVTVQEFALFFTIFDETKSWYFTENMERNCRAPCNIQMEDPTFKENYRFHAINGYIMDTLPGLVMAQDQRIRWYLLSMGSNENIHSIHFSGHVFTVRKKEEYKMALYNLYPGVFETVEMLPSKAGIWRVECLIGEHLHAGMSTLFLVYSNKCQTPLGMASGHIRDFQITASGQYGQWAPKLARLHYSGSINAWSTKEPFSWIKVDLLAPMIIHGIKTQGARQKFSSLYISQFIIMYSLDGKKWQTYRGNSTGTLMVFFGNVDSSGIKHNIFNPPIIARYIRLHPTHYSIRSTLRMELMGCDLNSCSMPLGMESKAISDAQITASSYFTNMFATWSPSKARLHLQGRSNAWRPQVNNPKEWLQVDFQKTMKVTGVTTQGVKSLLTSMYVKEFLISSSQDGHQWTLFFQNGKVKVFQGNQDSFTPVVNSLDPPLLTRYLRIHPQSWVHQIALRMEVLGCEAQDLY

SEQ ID NO: 2541 - DNA, 4371 bp, synthetic construct
  misc_feature 1..4371: note = Variant of human B-domain deleted Factor VIII
  source 1..4371: mol_type = other DNA
atgcagattgaactgtctacctgcttcttcctctgtttgctgaggttctgctttagcgccactagacggtactaccttggcgctgtggagctgtcctgggactatatgcagagtgatttgggagagcttcccgtcgacgcacgatttcctcctcgcgttccaaagtcatttcccttcaacacaagcgtggtgtacaagaagacgctcttcgtcgaattcaccgatcacctgttcaatatcgccaaacccagaccaccatggatgggtcttttggggcctaccatacaagcggaggtgtatgacacagttgttatcactctcaagaacatggcttctcatccggtaagtcttcacgcagtgggcgtgtcctactggaaagcttcagaaggagccgagtatgatgatcagacatcccagagggagaaagaagacgacaaggtatttccaggtgggtctcatacctatgtgtggcaagtgctcaaagagaatggccctatggcaagcgatccgctctgtttgacttacagctacctttcacacgttgacctcgtcaaggacctcaactccgggttgattggagccttgttggtatgcagggaaggatctcttgccaaagagaagacacagaccctccacaagtttatccttctctttgctgtgttcgatgagggcaaaagttggcatagcgaaacgaagaattccctcatgcaggatcgcgacgcagccagcgccagagcttggcccaagatgcacactgtgaacggatatgtcaataggtcacttcctggcttgattgggtgtcatcggaaaagtgtctactggcacgtgatcggaatggggacaacaccagaggtccactccatatttctcgaaggccataccttccttgttcgaaaccacagacaggcatccttggagatctctcccattacctttctcactgcccaaacgctccttatggacttgggtcagttccttctcttctgccatatcagctcacaccagcatgatggtatggaagcttatgtgaaagtcgacagttgtcctgaggagccacagttgcgcatgaagaataatgaagaagccgaggattacgacgacgatctcaccgattctgagatggacgtggtgaggtttgatgacgacaactctccctccttcattcaaatccggagcgtggcgaagaaacaccccaagacttgggtccactatatagcggcggaagaggaggattgggattacgctcctcttgtattggcaccagatgaccgctcatacaaaagccagtacctcaacaacggaccgcagagaattggccggaagtataagaaagtgcgatttatggcctatacagacgaaacctttaagacaagggaggccatccagcatgagagtgggattttgggacctcttctttacggcgaagttggtgataccctcctcatcatcttcaagaatcaagcttctcgcccctataacatttacccacacgggatcactgacgttaggcctttgtatagcagaagacttcccaaaggcgtgaagcatctcaaagacttccccattttgccaggcgagatctttaagtacaaatggaccgtcacagtggaagatggaccgactaaatcagaccctcgatgccttacgcggtactattcctccttcgtgaatatggagagagatttggcaagcggactcataggaccactcctcatctgttacaaggaatctgtagaccagaggggtaaccagattatgagtgataaacgcaatgtgatcctttttagcgtcttcgacgagaaccggtcctggtacttgaccgagaatatacaaaggttccttcccaaccccgcaggcgttcagttggaagaccctgagtttcaggccagcaatattatgcactcaatcaacggctatgtgtttgatagtctccagctttctgtttgcctccatgaagtagcctattggtacatcttgtcaattggtgctcaaacagacttcctctccgtcttcttctccggctacacctttaagcacaagatggtgtatgaggacactctcacactctttccattttctggagaaaccgtgttcatgagcatggagaatccaggcctttggatcttgggttgccacaacagtgattttcgcaatcggggaatgactgctctcctcaaagtcagcagctgtgataagaacacaggcgactattacgaagattcttacgaggacataagtgcctacttgttgtccaagaataacgccattgagcccagatcattctcccagaatcctcccgtgcttaaaaggcatcagcgcgaaatcaccagaactactcttcagtctgatcaagaggagattgactatgacgacaccataagcgtggaaatgaagaaggaggatttcgatatctatgacgaagatgagaaccagtctccgcggagctttcagaagaagacgcgacactacttcattgcagcagtcgaaaggctttgggactacggtatgtcatcatcccctcatgtgttgcgcaatagagctcagagtggaagtgttccacagttcaagaaagtcgtctttcaagagtttacagatggcagcttcacacagcctctctatcggggcgagcttaacgaacatttgggactccttggtccctatatccgagccgaagtggaggacaacattatggttacctttaggaatcaagcctctcgcccctacagcttctactcctccctcatcagttatgaggaggatcagagacaaggcgctgaaccacggaagaactttgtgaaaccgaatgagacgaagacctacttctggaaagtacagcaccacatggcccccacaaaagacgaattcgattgcaaagcatgggcgtatttttcagacgttgacttggagaaagatgtacattcaggacttattggtcctttgttggtgtgtcacactaacactctcaatccagcccatggcaggcaggtgacagtccaggaattcgctcttttctttaccatctttgatgagaccaagtcctggtacttcacggaaaacatggagcgcaattgcagagccccctgtaacatacagatggaggaccctacctttaaggaaaattatcggttccacgcaatcaacggatacattatggatacactccctggccttgtgatggctcaggaccaacgaatcaggtggtacctcctcagcatgggttctaatgagaacatacactccattcacttttcaggacatgtgttcactgtccggaagaaagaagagtataagatggccctctacaatttgtatccaggcgtgtttgagaccgttgaaatgcttccctctaaagctggcatctggagagtagagtgcttgatcggagaacatcttcacgcaggtatgagcaccttgttcctcgtgtacagcaacaaatgtcagaccccacttggcatggccagtggacacattcgcgactttcagatcacagcatctggccagtatggacaatgggccccaaagttggctcgcctccattactccggtagcataaatgcgtggtccactaaagaacctttcagctggattaaggtcgatcttcttgcccccatgatcatccacggcattaagacacagggagcgaggcagaaattctcctccctctacatctcacagttcattattatgtatagtttggacggcaagaagtggcaaacttatagaggtaacagtactggaacactcatggtgttcttcggcaacgttgatagctctggcatcaaacacaacatctttaatcctcccataatagctcggtacatcagattgcatccgacccactacagcattaggagtacactccgaatggagcttatgggttgcgacttgaattcctgttcaatgccactcggaatggagtctaaagccatctctgatgcacagataaccgccagtagctactttacgaacatgtttgctacgtggtcaccctctaaggcaaggcttcatttgcaaggccggtctaatgcctggagacctcaggtgaacaacccgaaagaatggctccaggtggactttcagaagaccatgaaagtaacaggtgtcactactcagggagttaagtccttgctcaccagcatgtatgtgaaggagttccttatttcctcatcacaagatggccaccagtggaccctcttctttcagaatggtaaggtcaaagtgtttcagggcaatcaagacagcttcacacccgtggtgaacagtcttgatcctccactcttgacacgataccttcgaatccatccacagtcttggcatcaccagattgcattgcgcatggaagtacttggatgcgaggctcaggacctctac

SEQ ID NO: 2542 - protein, 1457 aa, synthetic construct
  REGION 1..1457: note = Variant of human B-domain deleted Factor VIII
MQIELSTCFFLCLLRFCFSATRRYYLGAVELSWDYMQSDLGELPVDARFPPRVPKSFPFNTSVVYKKTLFVEFTDHLFNIAKPRPPWMGLLGPTIQAEVYDTVVITLKNMASHPVSLHAVGVSYWKASEGAEYDDQTSQREKEDDKVFPGGSHTYVWQVLKENGPMASDPLCLTYSYLSHVDLVKDLNSGLIGALLVCREGSLAKEKTQTLHKFILLFAVFDEGKSWHSETKNSLMQDRDAASARAWPKMHTVNGYVNRSLPGLIGCHRKSVYWHVIGMGTTPEVHSIFLEGHTFLVRNHRQASLEISPITFLTAQTLLMDLGQFLLFCHISSHQHDGMEAYVKVDSCPEEPQLRMKNNEEAEDYDDDLTDSEMDVVRFDDDNSPSFIQIRSVAKKHPKTWVHYIAAEEEDWDYAPLVLAPDDRSYKSQYLNNGPQRIGRKYKKVRFMAYTDETFKTREAIQHESGILGPLLYGEVGDTLLIIFKNQASRPYNIYPHGITDVRPLYSRRLPKGVKHLKDFPILPGEIFKYKWTVTVEDGPTKSDPRCLTRYYSSFVNMERDLASGLIGPLLICYKESVDQRGNQIMSDKRNVILFSVFDENRSWYLTENIQRFLPNPAGVQLEDPEFQASNIMHSINGYVFDSLQLSVCLHEVAYWYILSIGAQTDFLSVFFSGYTFKHKMVYEDTLTLFPFSGETVFMSMENPGLWILGCHNSDFRNRGMTALLKVSSCDKNTGDYYEDSYEDISAYLLSKNNAIEPRSFSQNPPVLKRHQREITRTTLQSDQEEIDYDDTISVEMKKEDFDIYDEDENQSPRSFQKKTRHYFIAAVERLWDYGMSSSPHVLRNRAQSGSVPQFKKVVFQEFTDGSFTQPLYRGELNEHLGLLGPYIRAEVEDNIMVTFRNQASRPYSFYSSLISYEEDQRQGAEPRKNFVKPNETKTYFWKVQHHMAPTKDEFDCKAWAYFSDVDLEKDVHSGLIGPLLVCHTNTLNPAHGRQVTVQEFALFFTIFDETKSWYFTENMERNCRAPCNIQMEDPTFKENYRFHAINGYIMDTLPGLVMAQDQRIRWYLLSMGSNENIHSIHFSGHVFTVRKKEEYKMALYNLYPGVFETVEMLPSKAGIWRVECLIGEHLHAGMSTLFLVYSNKCQTPLGMASGHIRDFQITASGQYGQWAPKLARLHYSGSINAWSTKEPFSWIKVDLLAPMIIHGIKTQGARQKFSSLYISQFIIMYSLDGKKWQTYRGNSTGTLMVFFGNVDSSGIKHNIFNPPIIARYIRLHPTHYSIRSTLRMELMGCDLNSCSMPLGMESKAISDAQITASSYFTNMFATWSPSKARLHLQGRSNAWRPQVNNPKEWLQVDFQKTMKVTGVTTQGVKSLLTSMYVKEFLISSSQDGHQWTLFFQNGKVKVFQGNQDSFTPVVNSLDPPLLTRYLRIHPQSWHHQIALRMEVLGCEAQDLY

SEQ ID NO: 2543 - DNA, 4371 bp, synthetic construct
  misc_feature 1..4371: note = Variant of human B-domain deleted Factor VIII
  source 1..4371: mol_type = other DNA
atgcagattgaactgtctacctgcttcttcctctgtttgctgaggttctgctttagcgccactagacggtactaccttggcgctgtggagctgtcctgggactatatgcagagtgatttgggagagcttcccgtcgacgcacgatttcctcctcgcgttccaaagtcatttcccttcaacacaagcgtggtgtacaagaagacgctcttcgtcgaattcaccgatcacctgttcaatatcgccaaacccagaccaccatggatgggtcttttggggcctaccatacaagcggaggtgtatgacacagttgttatcactctcaagaacatggcttctcatccggtaagtcttcacgcagtgggcgtgtcctactggaaagcttcagaaggagccgagtatgatgatcagacatcccagagggagaaagaagacgacaaggtatttccaggtgggtctcatacctatgtgtggcaagtgctcaaagagaatggccctatggcaagcgatccgctctgtttgacttacagctacctttcacacgttgacctcgtcaaggacctcaactccgggttgattggagccttgttggtatgcagggaaggatctcttgccaaagagaagacacagaccctccacaagtttatccttctctttgctgtgttcgatgagggcaaaagttggcatagcgaaacgaagaattccctcatgcaggatcgcgacgcagccagcgccagagcttggcccaagatgcacactgtgaacggatatgtcaataggtcacttcctggcttgattgggtgtcatcggaaaagtgtctactggcacgtgatcggaatggggacaacaccagaggtccactccatatttctcgaaggccataccttccttgttcgaaaccacagacaggcatccttggagatctctcccattacctttctcactgcccaaacggtgcttatggacttgggtcagttccttctcttctgccatatcagctcacaccagcatgatggtatggaagcttatgtgaaagtcgacagttgtcctgaggagccacagttgcgcatgaagaataatgaagaagccgaggattacgacgacgatctcaccgattctgagatggacgtggtgaggtttgatgacgacaactctccctccttcattcaaatccggagcgtggcgaagaaacaccccaagacttgggtccactatatagcggcggaagaggaggattgggattacgctcctcttgtattggcaccagatgaccgctcatacaaaagccagtacctcaacaacggaccgcagagaattggccggaagtataagaaagtgcgatttatggcctatacagacgaaacctttaagacaagggaggccatccagcatgagagtgggattttgggacctcttctttacggcgaagttggtgataccctcctcatcatcttcaagaatcaagcttctcgcccctataacatttacccacacgggatcactgacgttaggcctttgtatagcagaagacttcccaaaggcgtgaagcatctcaaagacttccccattttgccaggcgagatctttaagtacaaatggaccgtcacagtggaagatggaccgactaaatcagaccctcgatgccttacgcggtactattcctccttcgtgaatatggagagagatttggcaagcggactcataggaccactcctcatctgttacaaggaatctgtagaccagaggggtaaccagattatgagtgataaacgcaatgtgatcctttttagcgtcttcgacgagaaccggtcctggtacttgaccgagaatatacaaaggttccttcccaaccccgcaggcgttcagttggaagaccctgagtttcaggccagcaatattatgcactcaatcaacggctatgtgtttgatagtctccagctttctgtttgcctccatgaagtagcctattggtacatcttgtcaattggtgctcaaacagacttcctctccgtcttcttctccggctacacctttaagcacaagatggtgtatgaggacactctcacactctttccattttctggagaaaccgtgttcatgagcatggagaatccaggcctttggatcttgggttgccacaacagtgattttcgcaatcggggaatgactgctctcctcaaagtcagcagctgtgataagaacacaggcgactattacgaagattcttacgaggacataagtgcctacttgttgtccaagaataacgccattgagcccagatcattctcccagaatcctcccgtgcttaaaaggcatcagcgcgaaatcaccagaactactcttcagtctgatcaagaggagattgactatgacgacaccataagcgtggaaatgaagaaggaggatttcgatatctatgacgaagatgagaaccagtctccgcggagctttcagaagaagacgcgacactacttcattgcagcagtcgaaaggctttgggactacggtatgtcatcatcccctcatgtgttgcgcaatagagctcagagtggaagtgttccacagttcaagaaagtcgtctttcaagagtttacagatggcagcttcacacagcctctctatcggggcgagcttaacgaacatttgggactccttggtccctatatccgagccgaagtggaggacaacattatggttacctttaggaatcaagcctctcgcccctacagcttctactcctccctcatcagttatgaggaggatcagagacaaggcgctgaaccacggaagaactttgtgaaaccgaatgagacgaagacctacttctggaaagtacagcaccacatggcccccacaaaagacgaattcgattgcaaagcatgggcgtatttttcagacgttgacttggagaaagatgtacattcaggacttattggtcctttgttggtgtgtcacactaacactctcaatccagcccatggcaggcaggtgacagtccaggaattcgctcttttctttaccatctttgatgagaccaagtcctggtacttcacggaaaacatggagcgcaattgcagagccccctgtaacatacagatggaggaccctacctttaaggaaaattatcggttccacgcaatcaacggatacattatggatacactccctggccttgtgatggctcaggaccaacgaatcaggtggtacctcctcagcatgggttctaatgagaacatacactccattcacttttcaggacatgtgttcactgtccggaagaaagaagagtataagatggccctctacaatttgtatccaggcgtgtttgagaccgttgaaatgcttccctctaaagctggcatctggagagtagagtgcttgatcggagaacatcttcacgcaggtatgagcaccttgttcctcgtgtacagcaacaaatgtcagaccccacttggcatggccagtggacacattcgcgactttcagatcacagcatctggccagtatggacaatgggccccaaagttggctcgcctccattactccggtagcataaatgcgtggtccactaaagaacctttcagctggattaaggtcgatcttcttgcccccatgatcatccacggcattaagacacagggagcgaggcagaaattctcctccctctacatctcacagttcattattatgtatagtttggacggcaagaagtggcaaacttatagaggtaacagtactggaacactcatggtgttcttcggcaacgttgatagctctggcatcaaacacaacatctttaatcctcccataatagctcggtacatcagattgcatccgacccactacagcattaggagtacactccgaatggagcttatgggttgcgacttgaattcctgttcaatgccactcggaatggagtctaaagccatctctgatgcacagataaccgccagtagctactttacgaacatgtttgctacgtggtcaccctctaaggcaaggcttcatttgcaaggccggtctaatgcctggagacctcaggtgaacaacccgaaagaatggctccaggtggactttcagaagaccatgaaagtaacaggtgtcactactcagggagttaagtccttgctcaccagcatgtatgtgaaggagttccttatttcctcatcacaagatggccaccagtggaccctcttctttcagaatggtaaggtcaaagtgtttcagggcaatcaagacagcttcacacccgtggtgaacagtcttgatcctccactcttgacacgataccttcgaatccatccacagtcttgggttcaccagattgcattgcgcatggaagtacttggatgcgaggctcaggacctctac

SEQ ID NO: 2544 - protein, 1457 aa, synthetic construct
  REGION 1..1457: note = Variant of human B-domain deleted Factor VIII
MQIELSTCFFLCLLRFCFSATRRYYLGAVELSWDYMQSDLGELPVDARFPPRVPKSFPFNTSVVYKKTLFVEFTDHLFNIAKPRPPWMGLLGPTIQAEVYDTVVITLKNMASHPVSLHAVGVSYWKASEGAEYDDQTSQREKEDDKVFPGGSHTYVWQVLKENGPMASDPLCLTYSYLSHVDLVKDLNSGLIGALLVCREGSLAKEKTQTLHKFILLFAVFDEGKSWHSETKNSLMQDRDAASARAWPKMHTVNGYVNRSLPGLIGCHRKSVYWHVIGMGTTPEVHSIFLEGHTFLVRNHRQASLEISPITFLTAQTVLMDLGQFLLFCHISSHQHDGMEAYVKVDSCPEEPQLRMKNNEEAEDYDDDLTDSEMDVVRFDDDNSPSFIQIRSVAKKHPKTWVHYIAAEEEDWDYAPLVLAPDDRSYKSQYLNNGPQRIGRKYKKVRFMAYTDETFKTREAIQHESGILGPLLYGEVGDTLLIIFKNQASRPYNIYPHGITDVRPLYSRRLPKGVKHLKDFPILPGEIFKYKWTVTVEDGPTKSDPRCLTRYYSSFVNMERDLASGLIGPLLICYKESVDQRGNQIMSDKRNVILFSVFDENRSWYLTENIQRFLPNPAGVQLEDPEFQASNIMHSINGYVFDSLQLSVCLHEVAYWYILSIGAQTDFLSVFFSGYTFKHKMVYEDTLTLFPFSGETVFMSMENPGLWILGCHNSDFRNRGMTALLKVSSCDKNTGDYYEDSYEDISAYLLSKNNAIEPRSFSQNPPVLKRHQREITRTTLQSDQEEIDYDDTISVEMKKEDFDIYDEDENQSPRSFQKKTRHYFIAAVERLWDYGMSSSPHVLRNRAQSGSVPQFKKVVFQEFTDGSFTQPLYRGELNEHLGLLGPYIRAEVEDNIMVTFRNQASRPYSFYSSLISYEEDQRQGAEPRKNFVKPNETKTYFWKVQHHMAPTKDEFDCKAWAYFSDVDLEKDVHSGLIGPLLVCHTNTLNPAHGRQVTVQEFALFFTIFDETKSWYFTENMERNCRAPCNIQMEDPTFKENYRFHAINGYIMDTLPGLVMAQDQRIRWYLLSMGSNENIHSIHFSGHVFTVRKKEEYKMALYNLYPGVFETVEMLPSKAGIWRVECLIGEHLHAGMSTLFLVYSNKCQTPLGMASGHIRDFQITASGQYGQWAPKLARLHYSGSINAWSTKEPFSWIKVDLLAPMIIHGIKTQGARQKFSSLYISQFIIMYSLDGKKWQTYRGNSTGTLMVFFGNVDSSGIKHNIFNPPIIARYIRLHPTHYSIRSTLRMELMGCDLNSCSMPLGMESKAISDAQITASSYFTNMFATWSPSKARLHLQGRSNAWRPQVNNPKEWLQVDFQKTMKVTGVTTQGVKSLLTSMYVKEFLISSSQDGHQWTLFFQNGKVKVFQGNQDSFTPVVNSLDPPLLTRYLRIHPQSWVHQIALRMEVLGCEAQDLY

SEQ ID NO: 2545 - DNA, 4371 bp, synthetic construct
  misc_feature 1..4371: note = Variant of human B-domain deleted Factor VIII
  source 1..4371: mol_type = other DNA
atgcagattgaactgtctacctgcttcttcctctgtttgctgaggttctgctttagcgccactagacggtactaccttggcgctgtggagctgtcctgggactatatgcagagtgatttgggagagcttcccgtcgacgcacgatttcctcctcgcgttccaaagtcatttcccttcaacacaagcgtggtgtacaagaagacgctcttcgtcgaattcaccgatcacctgttcaatatcgccaaacccagaccaccatggatgggtcttttggggcctaccatacaagcggaggtgtatgacacagttgttatcactctcaagaacatggcttctcatccggtaagtcttcacgcagtgggcgtgtcctactggaaagcttcagaaggagccgagtatgatgatcagacatcccagagggagaaagaagacgacaaggtatttccaggtgggtctcatacctatgtgtggcaagtgctcaaagagaatggccctatggcaagcgatccgctctgtttgacttacagctacctttcacacgttgacctcgtcaaggacctcaactccgggttgattggagccttgttggtatgcagggaaggatctcttgccaaagagaagacacagaccctccacaagtttatccttctctttgctgtgttcgatgagggcaaaagttggcatagcgaaacgaagaattccctcatgcaggatcgcgacgcagccagcgccagagcttggcccaagatgcacactgtgaacggatatgtcaataggtcacttcctggcttgattgggtgtcatcggaaaagtgtctactggcacgtgatcggaatggggacaacaccagaggtccactccatatttctcgaaggccataccttccttgttcgaaaccacagacaggcatccttggagatctctcccattacctttctcactgcccaaacgctccttatggacttgggtcagttccttctcttctgccatatcagctcacaccagcatgatggtatggaagcttatgtgaaagtcgacagttgtcctgaggagccacagttgcgcatgaagaataatgaagaagccgaggattacgacgacgatctcaccgattctgagatggacgtggtgaggtttgatgacgacaactctccctccttcattcaaatccggagcgtggcgaagaaacaccccaagacttgggtccactatatagcggcggaagaggaggattgggattacgctcctcttgtattggcaccagatgaccgctcatacaaaagccagtacctcaacaacggaccgcagagaattggccggaagtataagaaagtgcgatttatggcctatacagacgaaacctttaagacaagggaggccatccagcatgagagtgggattttgggacctcttctttacggcgaagttggtgataccctcctcatcatcttcaagaatcaagcttctcgcccctataacatttacccacacgggatcactgacgttaggcctttgtatagcagaagacttcccaaaggcgtgaagcatctcaaagacttccccattttgccaggcgagatctttaagtacaaatggaccgtcacagtggaagatggaccgactaaatcagaccctcgatgccttacgcggtactattcctccttcgtgaatatggagagagatttggcaagcggactcataggaccactcctcatctgttacaaggaatctgtagaccagaggggtaaccagattatgagtgataaacgcaatgtgatcctttttagcgtcttcgacgagaaccggtcctggtacttgaccgagaatatacaaaggttccttcccaaccccgcaggcgttcagttggaagaccctgagtttcaggccagcaatattatgcactcaatcaacggctatgtgtttgatagtctccagctttctgtttgcctccatgaagtagcctattggtacatcttgtcaattggtgctcaaacagacttcctctccgtcttcttctccggctacacctttaagcacaagatggtgtatgaggacactctcacactctttccattttctggagaaaccgtgttcatgagcatggagaatccaggcctttggatcttgggttgccacaacagtgattttcgcaatcggggaatgactgctctcctcaaagtcagcagctgtgataagaacacaggcgactattacgaagattcttacgaggacataagtgcctacttgttgtccaagaataacgccattgagcccagatcattctcccagaatcctcccgtgcttaaaaggcatcagcgcgaaatcaccagaactactcttcagtctgatcaagaggagattgactatgacgacaccataagcgtggaaatgaagaagtatgatttcgatatctatgacgaagatgagaaccagtctccgcggagctttcagaagaagacgcgacactacttcattgcagcagtcgaaaggctttgggactacggtatgtcatcatcccctcatgtgttgcgcaatagagctcagagtggaagtgttccacagttcaagaaagtcgtctttcaagagtttacagatggcagcttcacacagcctctctatcggggcgagcttaacgaacatttgggactccttggtccctatatccgagccgaagtggaggacaacattatggttacctttaggaatcaagcctctcgcccctacagcttctactcctccctcatcagttatgaggaggatcagagacaaggcgctgaaccacggaagaactttgtgaaaccgaatgagacgaagacctacttctggaaagtacagcaccacatggcccccacaaaagacgaattcgattgcaaagcatgggcgtatttttcagacgttgacttggagaaagatgtacattcaggacttattggtcctttgttggtgtgtcacactaacactctcaatccagcccatggcaggcaggtgacagtccaggaattcgctcttttctttaccatctttgatgagaccaagtcctggtacttcacggaaaacatggagcgcaattgcagagccccctgtaacatacagatggaggaccctacctttaaggaaaattatcggttccacgcaatcaacggatacattatggatacactccctggccttgtgatggctcaggaccaacgaatcaggtggtacctcctcagcatgggttctaatgagaacatacactccattcacttttcaggacatgtgttcactgtccggaagaaagaagagtataagatggccctctacaatttgtatccaggcgtgtttgagaccgttgaaatgcttccctctaaagctggcatctggagagtagagtgcttgatcggagaacatcttcacgcaggtatgagcaccttgttcctcgtgtacagcaacaaatgtcagaccccacttggcatggccagtggacacattcgcgactttcagatcacagcatctggccagtatggacaatgggccccaaagttggctcgcctccattactccggtagcataaatgcgtggtccactaaagaacctttcagctggattaaggtcgatcttcttgcccccatgatcatccacggcattaagacacagggagcgaggcagaaattctcctccctctacatctcacagttcattattatgtatagtttggacggcaagaagtggcaaacttatagaggtaacagtactggaacactcatggtgttcttcggcaacgttgatagctctggcatcaaacacaacatctttaatcctcccataatagctcggtacatcagattgcatccgacccactacagcattaggagtacactccgaatggagcttatgggttgcgacttgaattcctgttcaatgccactcggaatggagtctaaagccatctctgatgcacagataaccgccagtagctactttacgaacatgtttgctacgtggtcaccctctaaggcaaggcttcatttgcaaggccggtctaatgcctggagacctcaggtgaacaacccgaaagaatggctccaggtggactttcagaagaccatgaaagtaacaggtgtcactactcagggagttaagtccttgctcaccagcatgtatgtgaaggagttccttatttcctcatcacaagatggccaccagtggaccctcttctttcagaatggtaaggtcaaagtgtttcagggcaatcaagacagcttcacacccgtggtgaacagtcttgatcctccactcttgacacgataccttcgaatccatccacagtcttgggttcaccagattgcattgcgcatggaagtacttggatgcgaggctcaggacctctac

SEQ ID NO: 2546 - protein, 1457 aa, synthetic construct
  REGION 1..1457: note = Variant of human B-domain deleted Factor VIII
MQIELSTCFFLCLLRFCFSATRRYYLGAVELSWDYMQSDLGELPVDARFPPRVPKSFPFNTSVVYKKTLFVEFTDHLFNIAKPRPPWMGLLGPTIQAEVYDTVVITLKNMASHPVSLHAVGVSYWKASEGAEYDDQTSQREKEDDKVFPGGSHTYVWQVLKENGPMASDPLCLTYSYLSHVDLVKDLNSGLIGALLVCREGSLAKEKTQTLHKFILLFAVFDEGKSWHSETKNSLMQDRDAASARAWPKMHTVNGYVNRSLPGLIGCHRKSVYWHVIGMGTTPEVHSIFLEGHTFLVRNHRQASLEISPITFLTAQTLLMDLGQFLLFCHISSHQHDGMEAYVKVDSCPEEPQLRMKNNEEAEDYDDDLTDSEMDVVRFDDDNSPSFIQIRSVAKKHPKTWVHYIAAEEEDWDYAPLVLAPDDRSYKSQYLNNGPQRIGRKYKKVRFMAYTDETFKTREAIQHESGILGPLLYGEVGDTLLIIFKNQASRPYNIYPHGITDVRPLYSRRLPKGVKHLKDFPILPGEIFKYKWTVTVEDGPTKSDPRCLTRYYSSFVNMERDLASGLIGPLLICYKESVDQRGNQIMSDKRNVILFSVFDENRSWYLTENIQRFLPNPAGVQLEDPEFQASNIMHSINGYVFDSLQLSVCLHEVAYWYILSIGAQTDFLSVFFSGYTFKHKMVYEDTLTLFPFSGETVFMSMENPGLWILGCHNSDFRNRGMTALLKVSSCDKNTGDYYEDSYEDISAYLLSKNNAIEPRSFSQNPPVLKRHQREITRTTLQSDQEEIDYDDTISVEMKKYDFDIYDEDENQSPRSFQKKTRHYFIAAVERLWDYGMSSSPHVLRNRAQSGSVPQFKKVVFQEFTDGSFTQPLYRGELNEHLGLLGPYIRAEVEDNIMVTFRNQASRPYSFYSSLISYEEDQRQGAEPRKNFVKPNETKTYFWKVQHHMAPTKDEFDCKAWAYFSDVDLEKDVHSGLIGPLLVCHTNTLNPAHGRQVTVQEFALFFTIFDETKSWYFTENMERNCRAPCNIQMEDPTFKENYRFHAINGYIMDTLPGLVMAQDQRIRWYLLSMGSNENIHSIHFSGHVFTVRKKEEYKMALYNLYPGVFETVEMLPSKAGIWRVECLIGEHLHAGMSTLFLVYSNKCQTPLGMASGHIRDFQITASGQYGQWAPKLARLHYSGSINAWSTKEPFSWIKVDLLAPMIIHGIKTQGARQKFSSLYISQFIIMYSLDGKKWQTYRGNSTGTLMVFFGNVDSSGIKHNIFNPPIIARYIRLHPTHYSIRSTLRMELMGCDLNSCSMPLGMESKAISDAQITASSYFTNMFATWSPSKARLHLQGRSNAWRPQVNNPKEWLQVDFQKTMKVTGVTTQGVKSLLTSMYVKEFLISSSQDGHQWTLFFQNGKVKVFQGNQDSFTPVVNSLDPPLLTRYLRIHPQSWVHQIALRMEVLGCEAQDLY

SEQ ID NO: 2547 - DNA, 4371 bp, synthetic construct
  misc_feature 1..4371: note = Variant of human B-domain deleted Factor VIII
  source 1..4371: mol_type = other DNA
atgcagattgaactgtctacctgcttcttcctctgtttgctgaggttctgctttagcgccactagacggtactaccttggcgctgtggagctgtcctgggactatatgcagagtgatttgggagagcttcccgtcgacgcacgatttcctcctcgcgttccaaagtcatttcccttcaacacaagcgtggtgtacaagaagacgctcttcgtcgaattcaccgatcacctgttcaatatcgccaaacccagaccaccatggatgggtcttttggggcctaccatacaagcggaggtgtatgacacagttgttatcactctcaagaacatggcttctcatccggtaagtcttcacgcagtgggcgtgtcctactggaaagcttcagaaggagccgagtatgatgatcagacatcccagagggagaaagaagacgacaaggtatttccaggtgggtctcatacctatgtgtggcaagtgctcaaagagaatggccctatggcaagcgatccgctctgtttgacttacagctacctttcacacgttgacctcgtcaaggacctcaactccgggttgattggagccttgttggtatgcagggaaggatctcttgccaaagagaagacacagaccctcgtgaagtttatccttctctttgctgtgttcgatgagggcaaaagttggcatagcgaaacgaagaattccctcatgcaggatcgcgacgcagccagcgccagagcttggcccaagatgcacactgtgaacggatatgtcaataggtcacttcctggcttgattgggtgtcatcggaaaagtgtctactggcacgtgatcggaatggggacaacaccagaggtccactccatatttctcgaaggccataccttccttgttcgaaaccacagacaggcatccttggagatctctcccattacctttctcactgcccaaacgctccttatggacttgggtcagttccttctcttctgccatatcagctcacaccagcatgatggtatggaagcttatgtgaaagtcgacagttgtcctgaggagccacagttgcgcatgaagaataatgaagaagccgaggattacgacgacgatctcaccgattctgagatggacgtggtgaggtttgatgacgacaactctccctccttcattcaaatccggagcgtggcgaagaaacaccccaagacttgggtccactatatagcggcggaagaggaggattgggattacgctcctcttgtattggcaccagatgaccgctcatacaaaagccagtacctcaacaacggaccgcagagaattggccggaagtataagaaagtgcgatttatggcctatacagacgaaacctttaagacaagggaggccatccagcatgagagtgggattttgggacctcttctttacggcgaagttggtgataccctcctcatcatcttcaagaatcaagcttctcgcccctataacatttacccacacgggatcactgacgttaggcctttgtatagcagaagacttcccaaaggcgtgaagcatctcaaagacttccccattttgccaggcgagatctttaagtacaaatggaccgtcacagtggaagatggaccgactaaatcagaccctcgatgccttacgcggtactattcctccttcgtgaatatggagagagatttggcaagcggactcataggaccactcctcatctgttacaaggaatctgtagaccagaggggtaaccagattatgagtgataaacgcaatgtgatcctttttagcgtcttcgacgagaaccggtcctggtacttgaccgagaatatacaaaggttccttcccaaccccgcaggcgttcagttggaagaccctgagtttcaggccagcaatattatgcactcaatcaacggctatgtgtttgatagtctccagctttctgtttgcctccatgaagtagcctattggtacatcttgtcaattggtgctcaaacagacttcctctccgtcttcttctccggctacacctttaagcacaagatggtgtatgaggacactctcacactctttccattttctggagaaaccgtgttcatgagcatggagaatccaggcctttggatcttgggttgccacaacagtgattttcgcaatcggggaatgactgctctcctcaaagtcagcagctgtgataagaacacaggcgactattacgaagattcttacgaggacataagtgcctacttgttgtccaagaataacgccattgagcccagatcattctcccagaatcctcccgtgcttaaaaggcatcagcgcgaaatcaccagaactactcttcagtctgatcaagaggagattgactatgacgacaccataagcgtggaaatgaagaaggaggatttcgatatctatgacgaagatgagaaccagtctccgcggagctttcagaagaagacgcgacactacttcattgcagcagtcgaaaggctttgggactacggtatgtcatcatcccctcatgtgttgcgcaatagagctcagagtggaagtgttccacagttcaagaaagtcgtctttcaagagtttacagatggcagcttcacacagcctctctatcggggcgagcttaacgaacatttgggactccttggtccctatatccgagccgaagtggaggacaacattatggttacctttaggaatcaagcctctcgcccctacagcttctactcctccctcatcagttatgaggaggatcagagacaaggcgctgaaccacggaagaactttgtgaaaccgaatgagacgaagacctacttctggaaagtacagcaccacatggcccccacaaaagacgaattcgattgcaaagcatgggcgtatttttcagacgttgacttggagaaagatgtacattcaggacttattggtcctttgttggtgtgtcacactaacactctcaatccagcccatggcaggcaggtgacagtccaggaattcgctcttttctttaccatctttgatgagaccaagtcctggtacttcacggaaaacatggagcgcaattgcagagccccctgtaacatacagatggaggaccctacctttaaggaaaattatcggttccacgcaatcaacggatacattatggatacactccctggccttgtgatggctcaggaccaacgaatcaggtggtacctcctcagcatgggttctaatgagaacatacactccattcacttttcaggacatgtgttcactgtccggaagaaagaagagtataagatggccctctacaatttgtatccaggcgtgtttgagaccgttgaaatgcttccctctaaagctggcatctggagagtagagtgcttgatcggagaacatcttcacgcaggtatgagcaccttgttcctcgtgtacagcaacaaatgtcagaccccacttggcatggccagtggacacattcgcgactttcagatcacagcatctggccagtatggacaatgggccccaaagttggctcgcctccattactccggtagcataaatgcgtggtccactaaagaacctttcagctggattaaggtcgatcttcttgcccccatgatcatccacggcattaagacacagggagcgaggcagaaattctcctccctctacatctcacagttcattattatgtatagtttggacggcaagaagtggcaaacttatagaggtaacagtactggaacactcatggtgttcttcggcaacgttgatagctctggcatcaaacacaacatctttaatcctcccataatagctcggtacatcagattgcatccgacccactacagcattaggagtacactccgaatggagcttatgggttgcgacttgaattcctgttcaatgccactcggaatggagtctaaagccatctctgatgcacagataaccgccagtagctactttacgaacatgtttgctacgtggtcaccctctaaggcaaggcttcatttgcaaggccggtctaatgcctggagacctcaggtgaacaacccgaaagaatggctccaggtggactttcagaagaccatgaaagtaacaggtgtcactactcagggagttaagtccttgctcaccagcatgtatgtgaaggagttccttatttcctcatcacaagatggccaccagtggaccctcttctttcagaatggtaaggtcaaagtgtttcagggcaatcaagacagcttcacacccgtggtgaacagtcttgatcctccactcttgacacgataccttcgaatccatccacagtcttgggttcaccagattgcattgcgcatggaagtacttggatgcgaggctcaggacctctac

SEQ ID NO: 2548 - protein, 1457 aa, synthetic construct
  REGION 1..1457: note = Variant of human B-domain deleted Factor VIII
MQIELSTCFFLCLLRFCFSATRRYYLGAVELSWDYMQSDLGELPVDARFPPRVPKSFPFNTSVVYKKTLFVEFTDHLFNIAKPRPPWMGLLGPTIQAEVYDTVVITLKNMASHPVSLHAVGVSYWKASEGAEYDDQTSQREKEDDKVFPGGSHTYVWQVLKENGPMASDPLCLTYSYLSHVDLVKDLNSGLIGALLVCREGSLAKEKTQTLVKFILLFAVFDEGKSWHSETKNSLMQDRDAASARAWPKMHTVNGYVNRSLPGLIGCHRKSVYWHVIGMGTTPEVHSIFLEGHTFLVRNHRQASLEISPITFLTAQTLLMDLGQFLLFCHISSHQHDGMEAYVKVDSCPEEPQLRMKNNEEAEDYDDDLTDSEMDVVRFDDDNSPSFIQIRSVAKKHPKTWVHYIAAEEEDWDYAPLVLAPDDRSYKSQYLNNGPQRIGRKYKKVRFMAYTDETFKTREAIQHESGILGPLLYGEVGDTLLIIFKNQASRPYNIYPHGITDVRPLYSRRLPKGVKHLKDFPILPGEIFKYKWTVTVEDGPTKSDPRCLTRYYSSFVNMERDLASGLIGPLLICYKESVDQRGNQIMSDKRNVILFSVFDENRSWYLTENIQRFLPNPAGVQLEDPEFQASNIMHSINGYVFDSLQLSVCLHEVAYWYILSIGAQTDFLSVFFSGYTFKHKMVYEDTLTLFPFSGETVFMSMENPGLWILGCHNSDFRNRGMTALLKVSSCDKNTGDYYEDSYEDISAYLLSKNNAIEPRSFSQNPPVLKRHQREITRTTLQSDQEEIDYDDTISVEMKKEDFDIYDEDENQSPRSFQKKTRHYFIAAVERLWDYGMSSSPHVLRNRAQSGSVPQFKKVVFQEFTDGSFTQPLYRGELNEHLGLLGPYIRAEVEDNIMVTFRNQASRPYSFYSSLISYEEDQRQGAEPRKNFVKPNETKTYFWKVQHHMAPTKDEFDCKAWAYFSDVDLEKDVHSGLIGPLLVCHTNTLNPAHGRQVTVQEFALFFTIFDETKSWYFTENMERNCRAPCNIQMEDPTFKENYRFHAINGYIMDTLPGLVMAQDQRIRWYLLSMGSNENIHSIHFSGHVFTVRKKEEYKMALYNLYPGVFETVEMLPSKAGIWRVECLIGEHLHAGMSTLFLVYSNKCQTPLGMASGHIRDFQITASGQYGQWAPKLARLHYSGSINAWSTKEPFSWIKVDLLAPMIIHGIKTQGARQKFSSLYISQFIIMYSLDGKKWQTYRGNSTGTLMVFFGNVDSSGIKHNIFNPPIIARYIRLHPTHYSIRSTLRMELMGCDLNSCSMPLGMESKAISDAQITASSYFTNMFATWSPSKARLHLQGRSNAWRPQVNNPKEWLQVDFQKTMKVTGVTTQGVKSLLTSMYVKEFLISSSQDGHQWTLFFQNGKVKVFQGNQDSFTPVVNSLDPPLLTRYLRIHPQSWVHQIALRMEVLGCEAQDLY

SEQ ID NO: 2549 - DNA, 4371 bp, synthetic construct
  misc_feature 1..4371: note = Variant of human B-domain deleted Factor VIII
  source 1..4371: mol_type = other DNA
atgcagattgaactgtctacctgcttcttcctctgtttgctgaggttctgctttagcgccactagacggtactaccttggcgctgtggagctgtcctgggactatatgcagagtgatttgggagagcttcccgtcgacgcacgatttcctcctcgcgttccaaagtcatttcccttcaacacaagcgtggtgtacaagaagacgctcttcgtcgaattcaccgatcacctgttcaatatcgccaaacccagaccaccatggatgggtcttttggggcctaccatacaagcggaggtgtatgacacagttgttatcactctcaagaacatggcttctcatccggtaagtcttcacgcagtgggcgtgtcctactggaaagcttcagaaggagccgagtatgatgatcagacatcccagagggagaaagaagacgacaaggtatttccaggtgggtctcatacctatgtgtggcaagtgctcaaagagaatggccctatggcaagcgatccgctctgtttgacttacagctacctttcacacgttgacctcgtcaaggacctcaactccgggttgattggagccttgttggtatgcagggaaggatctcttgccaaagagaagacacagaccctcaataagtttatccttctctttgctgtgttcgatgagggcaaaagttggcatagcgaaacgaagaattccctcatgcaggatcgcgacgcagccagcgccagagcttggcccaagatgcacactgtgaacggatatgtcaataggtcacttcctggcttgattgggtgtcatcggaaaagtgtctactggcacgtgatcggaatggggacaacaccagaggtccactccatatttctcgaaggccataccttccttgttcgaaaccacagacaggcatccttggagatctctcccattacctttctcactgcccaaacgctccttatggacttgggtcagttccttctcttctgccatatcagctcacaccagcatgatggtatggaagcttatgtgaaagtcgacagttgtcctgaggagccacagttgcgcatgaagaataatgaagaagccgaggattacgacgacgatctcaccgattctgagatggacgtggtgaggtttgatgacgacaactctccctccttcattcaaatccggagcgtggcgaagaaacaccccaagacttgggtccactatatagcggcggaagaggaggattgggattacgctcctcttgtattggcaccagatgaccgctcatacaaaagccagtacctcaacaacggaccgcagagaattggccggaagtataagaaagtgcgatttatggcctatacagacgaaacctttaagacaagggaggccatccagcatgagagtgggattttgggacctcttctttacggcgaagttggtgataccctcctcatcatcttcaagaatcaagcttctcgcccctataacatttacccacacgggatcactgacgttaggcctttgtatagcagaagacttcccaaaggcgtgaagcatctcaaagacttccccattttgccaggcgagatctttaagtacaaatggaccgtcacagtggaagatggaccgactaaatcagaccctcgatgccttacgcggtactattcctccttcgtgaatatggagagagatttggcaagcggactcataggaccactcctcatctgttacaaggaatctgtagaccagaggggtaaccagattatgagtgataaacgcaatgtgatcctttttagcgtcttcgacgagaaccggtcctggtacttgaccgagaatatacaaaggttccttcccaaccccgcaggcgttcagttggaagaccctgagtttcaggccagcaatattatgcactcaatcaacggctatgtgtttgatagtctccagctttctgtttgcctccatgaagtagcctattggtacatcttgtcaattggtgctcaaacagacttcctctccgtcttcttctccggctacacctttaagcacaagatggtgtatgaggacactctcacactctttccattttctggagaaaccgtgttcatgagcatggagaatccaggcctttggatcttgggttgccacaacagtgattttcgcaatcggggaatgactgctctcctcaaagtcagcagctgtgataagaacacaggcgactattacgaagattcttacgaggacataagtgcctacttgttgtccaagaataacgccattgagcccagatcattctcccagaatcctcccgtgcttaaaaggcatcagcgcgaaatcaccagaactactcttcagtctgatcaagaggagattgactatgacgacaccataagcgtggaaatgaagaaggaggatttcgatatctatgacgaagatgagaaccagtctccgcggagctttcagaagaagacgcgacactacttcattgcagcagtcgaaaggctttgggactacggtatgtcatcatcccctcatgtgttgcgcaatagagctcagagtggaagtgttccacagttcaagaaagtcgtctttcaagagtttacagatggcagcttcacacagcctctctatcggggcgagcttaacgaacatttgggactccttggtccctatatccgagccgaagtggaggacaacattatggttacctttaggaatcaagcctctcgcccctacagcttctactcctccctcatcagttatgaggaggatcagagacaaggcgctgaaccacggaagaactttgtgaaaccgaatgagacgaagacctacttctggaaagtacagcaccacatggcccccacaaaagacgaattcgattgcaaagcatgggcgtatttttcagacgttgacttggagaaagatgtacattcaggacttattggtcctttgttggtgtgtcacactaacactctcaatccagcccatggcaggcaggtgacagtccaggaattcgctcttttctttaccatctttgatgagaccaagtcctggtacttcacggaaaacatggagcgcaattgcagagccccctgtaacatacagatggaggaccctacctttaaggaaaattatcggttccacgcaatcaacggatacattatggatacactccctggccttgtgatggctcaggaccaacgaatcaggtggtacctcctcagcatgggttctaatgagaacatacactccattcacttttcaggacatgtgttcactgtccggaagaaagaagagtataagatggccctctacaatttgtatccaggcgtgtttgagaccgttgaaatgcttccctctaaagctggcatctggagagtagagtgcttgatcggagaacatcttcacgcaggtatgagcaccttgttcctcgtgtacagcaacaaatgtcagaccccacttggcatggccagtggacacattcgcgactttcagatcacagcatctggccagtatggacaatgggccccaaagttggctcgcctccattactccggtagcataaatgcgtggtccactaaagaacctttcagctggattaaggtcgatcttcttgcccccatgatcatccacggcattaagacacagggagcgaggcagaaattctcctccctctacatctcacagttcattattatgtatagtttggacggcaagaagtggcaaacttatagaggtaacagtactggaacactcatggtgttcttcggcaacgttgatagctctggcatcaaacacaacatctttaatcctcccataatagctcggtacatcagattgcatccgacccactacagcattaggagtacactccgaatggagcttatgggttgcgacttgaattcctgttcaatgccactcggaatggagtctaaagccatctctgatgcacagataaccgccagtagctactttacgaacatgtttgctacgtggtcaccctctaaggcaaggcttcatttgcaaggccggtctaatgcctggagacctcaggtgaacaacccgaaagaatggctccaggtggactttcagaagaccatgaaagtaacaggtgtcactactcagggagttaagtccttgctcaccagcatgtatgtgaaggagttccttatttcctcatcacaagatggccaccagtggaccctcttctttcagaatggtaaggtcaaagtgtttcagggcaatcaagacagcttcacacccgtggtgaacagtcttgatcctccactcttgacacgataccttcgaatccatccacagtcttgggttcaccagattgcattgcgcatggaagtacttggatgcgaggctcaggacctctac

SEQ ID NO: 2550 - protein, 1457 aa, synthetic construct
  REGION 1..1457: note = Variant of human B-domain deleted Factor VIII
MQIELSTCFFLCLLRFCFSATRRYYLGAVELSWDYMQSDLGELPVDARFPPRVPKSFPFNTSVVYKKTLFVEFTDHLFNIAKPRPPWMGLLGPTIQAEVYDTVVITLKNMASHPVSLHAVGVSYWKASEGAEYDDQTSQREKEDDKVFPGGSHTYVWQVLKENGPMASDPLCLTYSYLSHVDLVKDLNSGLIGALLVCREGSLAKEKTQTLNKFILLFAVFDEGKSWHSETKNSLMQDRDAASARAWPKMHTVNGYVNRSLPGLIGCHRKSVYWHVIGMGTTPEVHSIFLEGHTFLVRNHRQASLEISPITFLTAQTLLMDLGQFLLFCHISSHQHDGMEAYVKVDSCPEEPQLRMKNNEEAEDYDDDLTDSEMDVVRFDDDNSPSFIQIRSVAKKHPKTWVHYIAAEEEDWDYAPLVLAPDDRSYKSQYLNNGPQRIGRKYKKVRFMAYTDETFKTREAIQHESGILGPLLYGEVGDTLLIIFKNQASRPYNIYPHGITDVRPLYSRRLPKGVKHLKDFPILPGEIFKYKWTVTVEDGPTKSDPRCLTRYYSSFVNMERDLASGLIGPLLICYKESVDQRGNQIMSDKRNVILFSVFDENRSWYLTENIQRFLPNPAGVQLEDPEFQASNIMHSINGYVFDSLQLSVCLHEVAYWYILSIGAQTDFLSVFFSGYTFKHKMVYEDTLTLFPFSGETVFMSMENPGLWILGCHNSDFRNRGMTALLKVSSCDKNTGDYYEDSYEDISAYLLSKNNAIEPRSFSQNPPVLKRHQREITRTTLQSDQEEIDYDDTISVEMKKEDFDIYDEDENQSPRSFQKKTRHYFIAAVERLWDYGMSSSPHVLRNRAQSGSVPQFKKVVFQEFTDGSFTQPLYRGELNEHLGLLGPYIRAEVEDNIMVTFRNQASRPYSFYSSLISYEEDQRQGAEPRKNFVKPNETKTYFWKVQHHMAPTKDEFDCKAWAYFSDVDLEKDVHSGLIGPLLVCHTNTLNPAHGRQVTVQEFALFFTIFDETKSWYFTENMERNCRAPCNIQMEDPTFKENYRFHAINGYIMDTLPGLVMAQDQRIRWYLLSMGSNENIHSIHFSGHVFTVRKKEEYKMALYNLYPGVFETVEMLPSKAGIWRVECLIGEHLHAGMSTLFLVYSNKCQTPLGMASGHIRDFQITASGQYGQWAPKLARLHYSGSINAWSTKEPFSWIKVDLLAPMIIHGIKTQGARQKFSSLYISQFIIMYSLDGKKWQTYRGNSTGTLMVFFGNVDSSGIKHNIFNPPIIARYIRLHPTHYSIRSTLRMELMGCDLNSCSMPLGMESKAISDAQITASSYFTNMFATWSPSKARLHLQGRSNAWRPQVNNPKEWLQVDFQKTMKVTGVTTQGVKSLLTSMYVKEFLISSSQDGHQWTLFFQNGKVKVFQGNQDSFTPVVNSLDPPLLTRYLRIHPQSWVHQIALRMEVLGCEAQDLY

SEQ ID NO: 2551 - DNA, 4371 bp, synthetic construct
  misc_feature 1..4371: note = Variant of human B-domain deleted Factor VIII
  source 1..4371: mol_type = other DNA
atgcagattgaactgtctacctgcttcttcctctgtttgctgaggttctgctttagcgccactagacggtactaccttggcgctgtggagctgtcctgggactatatgcagagtgatttgggagagcttcccgtcgacgcacgatttcctcctcgcgttccaaagtcatttcccttcaacacaagcgtggtgtacaagaagacgctcttcgtcgaattcaccgatcacctgttcaatatcgccaaacccagaccaccatggatgggtcttttggggcctaccatacaagcggaggtgtatgacacagttgttatcactctcaagaacatggcttctcatccggtaagtcttcacgcagtgggcgtgtcctactggaaagcttcagaaggagccgagtatgatgatcagacatcccagagggagaaagaagacgacaaggtatttccaggtgggtctcatacctatgtgtggcaagtgctcaaagagaatggccctatggcaagcgatccgctctgtttgacttacagctacctttcacacgttgacctcgtcaaggacctcaactccgggttgattggagccttgttggtatgcagggaaggatctcttgccaaagagaagacacagaccctccacaagtttatccttctctttgctgtgttcgatgagggcaaaagttggcatagcgaaacgaagaattccctcatgcaggatcgcgacgcagccagcgccagagcttggcccaagatgcacactgtgaacggatatgtcaataggtcacttcctggcttgattgggtgtcatcggaaaagtgtctactggcacgtgatcggaatggggacaacaccagaggtccactccatatttctcgaaggccataccttccttgttcgaaaccacagacaggcatccttggagatctctcccattacctttctcactgcccaaacgctccttatggacttgggtcagttccttctcttctgccatatcagctcacaccagcatgatggtatggaagcttatgtgaaagtcgacagttgtcctgaggagccacagttgcgcatgaagaataatgaagaagccgaggattacgacgacgatctcaccgattctgagatggacgtggtgaggtttgatgacgacaactctccctccttcattcaaatccggagcgtggcgaagaaacaccccaagacttgggtccactatatagcggcggaagaggaggattgggattacgctcctcttgtattggcaccagatgaccgctcatacaaaagccagtacctcaacaacggaccgcagagaattggccggaagtataagaaagtgcgatttatggcctatacagacgaaacctttaagacaagggaggccatccagcatgagagtgggattttgggacctcttctttacggcgaagttggtgataccctcctcatcatcttcaagaatcaagcttctcgcccctataacatttacccacacgggatcactgacgttaggcctttgtatagcagaagacttcccaaaggcgtgaagcatctcaaagacttccccattttgccaggcgagatctttaagtacaaatggaccgtcacagtggaagatggaccgactaaatcagaccctcgatgccttacgcggtactattcctccttcgtgaatatggagagagatttggcaagcggactcataggaccactcctcatctgttacaaggaatctgtagaccagaggggtaaccagattatgagtgataaacgcaatgtgatcctttttagcgtcttcgacgagaaccggtcctggtacttgaccgagaatatacaaaggttccttcccaaccccgcaggcgttcagttggaagaccctgagtttcaggccagcaatattatgcactcaatcaacggctatgtgtttgatagtctccagctttctgtttgcctccatgaagtagcctattggtacatcttgtcaattggtgctcaaacagacttcctctccgtcttcttctccggctacacctttaagcacaagatggtgtatgaggacactctcacactctttccattttctggagaaaccgtgttcatgagcatggagaatccaggcctttggatcttgggttgccacaacagtgattttcgcaatcggggaatgactgctctcctcaaagtcagcagctgtgataagaacacaggcgactattacgaagattcttacgaggacataagtgcctacttgttgtccaagaataacgccattgagcccagatcattctcccagaatcctcccgtgcttaaaaggcatcagcgcgaaatcaccagaactactcttcagtctgatcaagaggagattgactatgacgacaccataagcgtggaaatgaagaagcaggatttcgatatctatgacgaagatgagaaccagtctccgcggagctttcagaagaagacgcgacactacttcattgcagcagtcgaaaggctttgggactacggtatgtcatcatcccctcatgtgttgcgcaatagagctcagagtggaagtgttccacagttcaagaaagtcgtctttcaagagtttacagatggcagcttcacacagcctctctatcggggcgagcttaacgaacatttgggactccttggtccctatatccgagccgaagtggaggacaacattatggttacctttaggaatcaagcctctcgcccctacagcttctactcctccctcatcagttatgaggaggatcagagacaaggcgctgaaccacggaagaactttgtgaaaccgaatgagacgaagacctacttctggaaagtacagcaccacatggcccccacaaaagacgaattcgattgcaaagcatgggcgtatttttcagacgttgacttggagaaagatgtacattcaggacttattggtcctttgttggtgtgtcacactaacactctcaatccagcccatggcaggcaggtgacagtccaggaattcgctcttttctttaccatctttgatgagaccaagtcctggtacttcacggaaaacatggagcgcaattgcagagccccctgtaacatacagatggaggaccctacctttaaggaaaattatcggttccacgcaatcaacggatacattatggatacactccctggccttgtgatggctcaggaccaacgaatcaggtggtacctcctcagcatgggttctaatgagaacatacactcaattcacttttcaggacatgtgttcactgtccggaagaaagaagagtataagatggccctctacaatttgtatccaggcgtgtttgagaccgttgaaatgcttccctctaaagctggcatctggagagtagagtgcttgatcggagaacatcttcacgcaggtatgagcaccttgttcctcgtgtacagcaacaaatgtcagaccccacttggcatggccagtggacacattcgcgactttcagatcacagcatctggccagtatggacaatgggccccaaagttggctcgcctccattactccggtagcataaatgcgtggtccactaaagaacctttcagctggattaaggtcgatcttcttgcccccatgatcatccacggcattaagacacagggagcgaggcagaaattctcctccctctacatctcacagttcattattatgtatagtttggacggcaagaagtggcaaacttatagaggtaacagtactggaacactcatggtgttcttcggcaacgttgatagctctggcatcaaacacaacatctttaatcctcccataatagctcggtacatcagattgcatccgacccactacagcattaggagtacactccgaatggagcttatgggttgcgacttgaattcctgttcaatgccactcggaatggagtctaaagccatctctgatgcacagataaccgccagtagctactttacgaacatgtttgctacgtggtcaccctctaaggcaaggcttcatttgcaaggccggtctaatgcctggagacctcaggtgaacaacccgaaagaatggctccaggtggactttcagaagaccatgaaagtaacaggtgtcactactcagggagttaagtccttgctcaccagcatgtatgtgaaggagttccttatttcctcatcacaagatggccaccagtggaccctcttctttcagaatggtaaggtcaaagtgtttcagggcaatcaagacagcttcacacccgtggtgaacagtcttgatcctccactcttgacacgataccttcgaatccatccacagtcttgggttcaccagattgcattgcgcatggaagtacttggatgcgaggctcaggacctctac

SEQ ID NO: 2552 - protein, 1457 aa, synthetic construct
  REGION 1..1457: note = Variant of human B-domain deleted Factor VIII
MQIELSTCFFLCLLRFCFSATRRYYLGAVELSWDYMQSDLGELPVDARFPPRVPKSFPFNTSVVYKKTLFVEFTDHLFNIAKPRPPWMGLLGPTIQAEVYDTVVITLKNMASHPVSLHAVGVSYWKASEGAEYDDQTSQREKEDDKVFPGGSHTYVWQVLKENGPMASDPLCLTYSYLSHVDLVKDLNSGLIGALLVCREGSLAKEKTQTLHKFILLFAVFDEGKSWHSETKNSLMQDRDAASARAWPKMHTVNGYVNRSLPGLIGCHRKSVYWHVIGMGTTPEVHSIFLEGHTFLVRNHRQASLEISPITFLTAQTLLMDLGQFLLFCHISSHQHDGMEAYVKVDSCPEEPQLRMKNNEEAEDYDDDLTDSEMDVVRFDDDNSPSFIQIRSVAKKHPKTWVHYIAAEEEDWDYAPLVLAPDDRSYKSQYLNNGPQRIGRKYKKVRFMAYTDETFKTREAIQHESGILGPLLYGEVGDTLLIIFKNQASRPYNIYPHGITDVRPLYSRRLPKGVKHLKDFPILPGEIFKYKWTVTVEDGPTKSDPRCLTRYYSSFVNMERDLASGLIGPLLICYKESVDQRGNQIMSDKRNVILFSVFDENRSWYLTENIQRFLPNPAGVQLEDPEFQASNIMHSINGYVFDSLQLSVCLHEVAYWYILSIGAQTDFLSVFFSGYTFKHKMVYEDTLTLFPFSGETVFMSMENPGLWILGCHNSDFRNRGMTALLKVSSCDKNTGDYYEDSYEDISAYLLSKNNAIEPRSFSQNPPVLKRHQREITRTTLQSDQEEIDYDDTISVEMKKQDFDIYDEDENQSPRSFQKKTRHYFIAAVERLWDYGMSSSPHVLRNRAQSGSVPQFKKVVFQEFTDGSFTQPLYRGELNEHLGLLGPYIRAEVEDNIMVTFRNQASRPYSFYSSLISYEEDQRQGAEPRKNFVKPNETKTYFWKVQHHMAPTKDEFDCKAWAYFSDVDLEKDVHSGLIGPLLVCHTNTLNPAHGRQVTVQEFALFFTIFDETKSWYFTENMERNCRAPCNIQMEDPTFKENYRFHAINGYIMDTLPGLVMAQDQRIRWYLLSMGSNENIHSIHFSGHVFTVRKKEEYKMALYNLYPGVFETVEMLPSKAGIWRVECLIGEHLHAGMSTLFLVYSNKCQTPLGMASGHIRDFQITASGQYGQWAPKLARLHYSGSINAWSTKEPFSWIKVDLLAPMIIHGIKTQGARQKFSSLYISQFIIMYSLDGKKWQTYRGNSTGTLMVFFGNVDSSGIKHNIFNPPIIARYIRLHPTHYSIRSTLRMELMGCDLNSCSMPLGMESKAISDAQITASSYFTNMFATWSPSKARLHLQGRSNAWRPQVNNPKEWLQVDFQKTMKVTGVTTQGVKSLLTSMYVKEFLISSSQDGHQWTLFFQNGKVKVFQGNQDSFTPVVNSLDPPLLTRYLRIHPQSWVHQIALRMEVLGCEAQDLY

SEQ ID NO: 2553 - DNA, 4371 bp, synthetic construct
  misc_feature 1..4371: note = Variant of human B-domain deleted Factor VIII
  source 1..4371: mol_type = other DNA
atgcagattgaactgtctacctgcttcttcctctgtttgctgaggttctgctttagcgccactagacggtactaccttggcgctgtggagctgtcctgggactatatgcagagtgatttgggagagcttcccgtcgacgcacgatttcctcctcgcgttccaaagtcatttcccttcaacacaagcgtggtgtacaagaagacgctcttcgtcgaattcaccgatcacctgttcaatatcgccaaacccagaccaccatggatgggtcttttggggcctaccatacaagcggaggtgtatgacacagttgttatcactctcaagaacatggcttctcatccggtaagtcttcacgcagtgggcgtgtcctactggaaagcttcagaaggagccgagtatgatgatcagacatcccagagggagaaagaagacgacaaggtatttccaggtgggtctcatacctatgtgtggcaagtgctcaaagagaatggccctatggcaagcgatccgctctgtttgacttacagctacctttcacacgttgacctcgtcaaggacctcaactccgggttgattggagccttgttggtatgcagggaaggatctcttgccaaagagaagacacagaccctcaagaagtttatccttctctttgctgtgttcgatgagggcaaaagttggcatagcgaaacgaagaattccctcatgcaggatcgcgacgcagccagcgccagagcttggcccaagatgcacactgtgaacggatatgtcaataggtcacttcctggcttgattgggtgtcatcggaaaagtgtctactggcacgtgatcggaatggggacaacaccagaggtccactccatatttctcgaaggccataccttccttgttcgaaaccacagacaggcatccttggagatctctcccattacctttctcactgcccaaacgctccttatggacttgggtcagttccttctcttctgccatatcagctcacaccagcatgatggtatggaagcttatgtgaaagtcgacagttgtcctgaggagccacagttgcgcatgaagaataatgaagaagccgaggattacgacgacgatctcaccgattctgagatggacgtggtgaggtttgatgacgacaactctccctccttcattcaaatccggagcgtggcgaagaaacaccccaagacttgggtccactatatagcggcggaagaggaggattgggattacgctcctcttgtattggcaccagatgaccgctcatacaaaagccagtacctcaacaacggaccgcagagaattggccggaagtataagaaagtgcgatttatggcctatacagacgaaacctttaagacaagggaggccatccagcatgagagtgggattttgggacctcttctttacggcgaagttggtgataccctcctcatcatcttcaagaatcaagcttctcgcccctataacatttacccacacgggatcactgacgttaggcctttgtatagcagaagacttcccaaaggcgtgaagcatctcaaagacttccccattttgccaggcgagatctttaagtacaaatggaccgtcacagtggaagatggaccgactaaatcagaccctcgatgccttacgcggtactattcctccttcgtgaatatggagagagatttggcaagcggactcataggaccactcctcatctgttacaaggaatctgtagaccagaggggtaaccagattatgagtgataaacgcaatgtgatcctttttagcgtcttcgacgagaaccggtcctggtacttgaccgagaatatacaaaggttccttcccaaccccgcaggcgttcagttggaagaccctgagtttcaggccagcaatattatgcactcaatcaacggctatgtgtttgatagtctccagctttctgtttgcctccatgaagtagcctattggtacatcttgtcaattggtgctcaaacagacttcctctccgtcttcttctccggctacacctttaagcacaagatggtgtatgaggacactctcacactctttccattttctggagaaaccgtgttcatgagcatggagaatccaggcctttggatcttgggttgccacaacagtgattttcgcaatcggggaatgactgctctcctcaaagtcagcagctgtgataagaacacaggcgactattacgaagattcttacgaggacataagtgcctacttgttgtccaagaataacgccattgagcccagatcattctcccagaatcctcccgtgcttaaaaggcatcagcgcgaaatcaccagaactactcttcagtctgatcaagaggagattgactatgacgacaccataagcgtggaaatgaagaaggaggatttcgatatctatgacgaagatgagaaccagtctccgcggagctttcagaagaagacgcgacactacttcattgcagcagtcgaaaggctttgggactacggtatgtcatcatcccctcatgtgttgcgcaatagagctcagagtggaagtgttccacagttcaagaaagtcgtctttcaagagtttacagatggcagcttcacacagcctctctatcggggcgagcttaacgaacatttgggactccttggtccctatatccgagccgaagtggaggacaacattatggttacctttaggaatcaagcctctcgcccctacagcttctactcctccctcatcagttatgaggaggatcagagacaaggcgctgaaccacggaagaactttgtgaaaccgaatgagacgaagacctacttctggaaagtacagcaccacatggcccccacaaaagacgaattcgattgcaaagcatgggcgtatttttcagacgttgacttggagaaagatgtacattcaggacttattggtcctttgttggtgtgtcacactaacactctcaatccagcccatggcaggcaggtgacagtccaggaattcgctcttttctttaccatctttgatgagaccaagtcctggtacttcacggaaaacatggagcgcaattgcagagccccctgtaacatacagatggaggaccctacctttaaggaaaattatcggttccacgcaatcaacggatacattatggatacactccctggccttgtgatggctcaggaccaacgaatcaggtggtacctcctcagcatgggttctaatgagaacatacactccattcacttttcaggacatgtgttcactgtccggaagaaagaagagtataagatggccctctacaatttgtatccaggcgtgtttgagaccgttgaaatgcttccctctaaagctggcatctggagagtagagtgcttgatcggagaacatcttcacgcaggtatgagcaccttgttcctcgtgtacagcaacaaatgtcagaccccacttggcatggccagtggacacattcgcgactttcagatcacagcatctggccagtatggacaatgggccccaaagttggctcgcctccattactccggtagcataaatgcgtggtccactaaagaacctttcagctggattaaggtcgatcttcttgcccccatgatcatccacggcattaagacacagggagcgaggcagaaattctcctccctctacatctcacagttcattattatgtatagtttggacggcaagaagtggcaaacttatagaggtaacagtactggaacactcatggtgttcttcggcaacgttgatagctctggcatcaaacacaacatctttaatcctcccataatagctcggtacatcagattgcatccgacccactacagcattaggagtacactccgaatggagcttatgggttgcgacttgaattcctgttcaatgccactcggaatggagtctaaagccatctctgatgcacagataaccgccagtagctactttacgaacatgtttgctacgtggtcaccctctaaggcaaggcttcatttgcaaggccggtctaatgcctggagacctcaggtgaacaacccgaaagaatggctccaggtggactttcagaagaccatgaaagtaacaggtgtcactactcagggagttaagtccttgctcaccagcatgtatgtgaaggagttccttatttcctcatcacaagatggccaccagtggaccctcttctttcagaatggtaaggtcaaagtgtttcagggcaatcaagacagcttcacacccgtggtgaacagtcttgatcctccactcttgacacgataccttcgaatccatccacagtcttgggttcaccagattgcattgcgcatggaagtacttggatgcgaggctcaggacctctac

SEQ ID NO: 2554 - protein, 1457 aa, synthetic construct
  REGION 1..1457: note = Variant of human B-domain deleted Factor VIII
MQIELSTCFFLCLLRFCFSATRRYYLGAVELSWDYMQSDLGELPVDARFPPRVPKSFPFNTSVVYKKTLFVEFTDHLFNIAKPRPPWMGLLGPTIQAEVYDTVVITLKNMASHPVSLHAVGVSYWKASEGAEYDDQTSQREKEDDKVFPGGSHTYVWQVLKENGPMASDPLCLTYSYLSHVDLVKDLNSGLIGALLVCREGSLAKEKTQTLKKFILLFAVFDEGKSWHSETKNSLMQDRDAASARAWPKMHTVNGYVNRSLPGLIGCHRKSVYWHVIGMGTTPEVHSIFLEGHTFLVRNHRQASLEISPITFLTAQTLLMDLGQFLLFCHISSHQHDGMEAYVKVDSCPEEPQLRMKNNEEAEDYDDDLTDSEMDVVRFDDDNSPSFIQIRSVAKKHPKTWVHYIAAEEEDWDYAPLVLAPDDRSYKSQYLNNGPQRIGRKYKKVRFMAYTDETFKTREAIQHESGILGPLLYGEVGDTLLIIFKNQASRPYNIYPHGITDVRPLYSRRLPKGVKHLKDFPILPGEIFKYKWTVTVEDGPTKSDPRCLTRYYSSFVNMERDLASGLIGPLLICYKESVDQRGNQIMSDKRNVILFSVFDENRSWYLTENIQRFLPNPAGVQLEDPEFQASNIMHSINGYVFDSLQLSVCLHEVAYWYILSIGAQTDFLSVFFSGYTFKHKMVYEDTLTLFPFSGETVFMSMENPGLWILGCHNSDFRNRGMTALLKVSSCDKNTGDYYEDSYEDISAYLLSKNNAIEPRSFSQNPPVLKRHQREITRTTLQSDQEEIDYDDTISVEMKKEDFDIYDEDENQSPRSFQKKTRHYFIAAVERLWDYGMSSSPHVLRNRAQSGSVPQFKKVVFQEFTDGSFTQPLYRGELNEHLGLLGPYIRAEVEDNIMVTFRNQASRPYSFYSSLISYEEDQRQGAEPRKNFVKPNETKTYFWKVQHHMAPTKDEFDCKAWAYFSDVDLEKDVHSGLIGPLLVCHTNTLNPAHGRQVTVQEFALFFTIFDETKSWYFTENMERNCRAPCNIQMEDPTFKENYRFHAINGYIMDTLPGLVMAQDQRIRWYLLSMGSNENIHSIHFSGHVFTVRKKEEYKMALYNLYPGVFETVEMLPSKAGIWRVECLIGEHLHAGMSTLFLVYSNKCQTPLGMASGHIRDFQITASGQYGQWAPKLARLHYSGSINAWSTKEPFSWIKVDLLAPMIIHGIKTQGARQKFSSLYISQFIIMYSLDGKKWQTYRGNSTGTLMVFFGNVDSSGIKHNIFNPPIIARYIRLHPTHYSIRSTLRMELMGCDLNSCSMPLGMESKAISDAQITASSYFTNMFATWSPSKARLHLQGRSNAWRPQVNNPKEWLQVDFQKTMKVTGVTTQGVKSLLTSMYVKEFLISSSQDGHQWTLFFQNGKVKVFQGNQDSFTPVVNSLDPPLLTRYLRIHPQSWVHQIALRMEVLGCEAQDLY

SEQ ID NO: 2555 - DNA, 4371 bp, synthetic construct
  misc_feature 1..4371: note = Variant of human B-domain deleted Factor VIII
  source 1..4371: mol_type = other DNA
atgcagattgaactgtctacctgcttcttcctctgtttgctgaggttctgctttagcgccactagacggtactaccttggcgctgtggagctgtcctgggactatatgcagagtgatttgggagagcttcccgtcgacgcacgatttcctcctcgcgttccaaagtcatttcccttcaacacaagcgtggtgtacaagaagacgctcttcgtcgaattcaccgatcacctgttcaatatcgccaaacccagaccaccatggatgggtcttttggggcctaccatacaagcggaggtgtatgacacagttgttatcactctcaagaacatggcttctcatccggtaagtcttcacgcagtgggcgtgtcctactggaaagcttcagaaggagccgagtatgatgatcagacatcccagagggagaaagaagacgacaaggtatttccaggtgggtctcatacctatgtgtggcaagtgctcaaagagaatggccctatggcaagcgatccgctctgtttgacttacagctacctttcacacgttgacctcgtcaaggacctcaactccgggttgattggagccttgttggtatgcagggaaggatctcttgccaaagagaagacacagaccctccacaagtttatccttctctttgctgtgttcgatgagggcaaaagttggcatagcgaaacgaagaattccctcatgcaggatcgcgacgcagccagcgccagagcttggcccaagatgcacactgtgaacggatatgtcaataggtcacttcctggcttgattgggtgtcatcggaaaagtgtctactggcacgtgatcggaatggggacaacaccagaggtccactccatatttctcgaaggccataccttccttgttcgaaaccacagacaggcatccttggagatctctcccattacctttctcactgcccaaacgctccttatggacttgggtcagttccttctcttctgccatatcagctcacaccagcatgatggtatggaagcttatgtgaaagtcgacagttgtcctgaggagccacagttgcgcatgaagaataatgaagaagccgaggattacgacgacgatctcaccgattctgagatggacgtggtgaggtttgatgacgacaactctccctccttcattcaaatccggagcgtggcgaagaaacaccccaagacttgggtccactatatagcggcggaagaggaggattgggattacgctcctcttgtattggcaccagatgaccgctcatacaaaagccagtacctcaacaacggaccgcagagaattggccggaagtataagaaagtgcgatttatggcctatacagacgaaacctttaagacaagggaggccatccagcatgagagtgggattttgggacctcttctttacggcgaagttggtgataccctcctcatcatcttcaagaatcaagcttctcgcccctataacatttacccacacgggatcactgacgttaggcctttgtatagcagaagacttcccaaaggcgtgaagcatctcaaagacttccccattttgccaggcgagatctttaagtacaaatggaccgtcacagtggaagatggaccgactaaatcagaccctcgatgccttacgcggtactattcctccttcgtgaatatggagagagatttggcaagcggactcataggaccactcctcatctgttacaaggaatctgtagaccagaggggtaaccagattatgagtgataaacgcaatgtgatcctttttagcgtcttcgacgagaaccggtcctggtacttgaccgagaatatacaaaggttccttcccaaccccgcaggcgttcagttggaagaccctgagtttcaggccagcaatattatgcactcaatcaacggctatgtgtttgatagtctccagctttctgtttgcctccatgaagtagcctattggtacatcttgtcaattggtgctcaaacagacttcctctccgtcttcttctccggctacacctttaagcacaagatggtgtatgaggacactctcacactctttccattttctggagaaaccgtgttcatgagcatggagaatccaggcctttggatcttgggttgccacaacagtgattttcgcaatcggggaatgactgctctcctcaaagtcagcagctgtgataagaacacaggcgactattacgaagattcttacgaggacataagtgcctacatgttgtccaagaataacgccattgagcccagatcattctcccagaatcctcccgtgcttaaaaggcatcagcgcgaaatcaccagaactactcttcagtctgatcaagaggagattgactatgacgacaccataagcgtggaaatgaagaaggaggatttcgatatctatgacgaagatgagaaccagtctccgcggagctttcagaagaagacgcgacactacttcattgcagcagtcgaaaggctttgggactacggtatgtcatcatcccctcatgtgttgcgcaatagagctcagagtggaagtgttccacagttcaagaaagtcgtctttcaagagtttacagatggcagcttcacacagcctctctatcggggcgagcttaacgaacatttgggactccttggtccctatatccgagccgaagtggaggacaacattatggttacctttaggaatcaagcctctcgcccctacagcttctactcctccctcatcagttatgaggaggatcagagacaaggcgctgaaccacgtaagaactttgtgaaaccgaatgagacgaagacctacttctggaaagtacagcaccacatggcccccacaaaagacgaattcgattgcaaagcatgggcgtatttttcagacgttgacttggagaaagatgtacattcaggacttattggtcctttgttggtgtgtcacactaacactctcaatccagcccatggcaggcaggtgacagtccaggaattcgctcttttctttaccatctttgatgagaccaagtcctggtacttcacggaaaacatggagcgcaattgcagagccccctgtaacatacagatggaggaccctacctttaaggaaaattatcggttccacgcaatcaacggatacattatggatacactccctggccttgtgatggctcaggaccaacgaatcaggtggtacctcctcagcatgggttctaatgagaacatacactccattcacttttcaggacatgtgttcactgtccggaagaaagaagagtataagatggccctctacaatttgtatccaggcgtgtttgagaccgttgaaatgcttccctctaaagctggcatctggagagtagagtgcttgatcggagaacatcttcacgcaggtatgagcaccttgttcctcgtgtacagcaacaaatgtcagaccccacttggcatggccagtggacacattcgcgactttcagatcacagcatctggccagtatggacaatgggccccaaagttggctcgcctccattactccggtagcataaatgcgtggtccactaaagaacctttcagctggattaaggtcgatcttcttgcccccatgatcatccacggcattaagacacagggagcgaggcagaaattctcctccctctacatctcacagttcattattatgtatagtttggacggcaagaagtggcaaacttatagaggtaacagtactggaacactcatggtgttcttcggcaacgttgatagctctggcatcaaacacaacatctttaatcctcccataatagctcggtacatcagattgcatccgacccactacagcattaggagtacactccgaatggagcttatgggttgcgacttgaattcctgttcaatgccactcggaatggagtctaaagccatctctgatgcacagataaccgccagtagctactttacgaacatgtttgctacgtggtcaccctctaaggcaaggcttcatttgcaaggccggtctaatgcctggagacctcaggtgaacaacccgaaagaatggctccaggtggactttcagaagaccatgaaagtaacaggtgtcactactcagggagttaagtccttgctcaccagcatgtatgtgaaggagttccttatttcctcatcacaagatggccaccagtggaccctcttctttcagaatggtaaggtcaaagtgtttcagggcaatcaagacagcttcacacccgtggtgaacagtcttgatcctccactcttgacacgataccttcgaatccatccacagtcttgggttcaccagattgcattgcgcatggaagtacttggatgcgaggctcaggacctctac

SEQ ID NO: 2556 - protein, 1457 aa, synthetic construct
  REGION 1..1457: note = Variant of human B-domain deleted Factor VIII
MQIELSTCFFLCLLRFCFSATRRYYLGAVELSWDYMQSDLGELPVDARFPPRVPKSFPFNTSVVYKKTLFVEFTDHLFNIAKPRPPWMGLLGPTIQAEVYDTVVITLKNMASHPVSLHAVGVSYWKASEGAEYDDQTSQREKEDDKVFPGGSHTYVWQVLKENGPMASDPLCLTYSYLSHVDLVKDLNSGLIGALLVCREGSLAKEKTQTLHKFILLFAVFDEGKSWHSETKNSLMQDRDAASARAWPKMHTVNGYVNRSLPGLIGCHRKSVYWHVIGMGTTPEVHSIFLEGHTFLVRNHRQASLEISPITFLTAQTLLMDLGQFLLFCHISSHQHDGMEAYVKVDSCPEEPQLRMKNNEEAEDYDDDLTDSEMDVVRFDDDNSPSFIQIRSVAKKHPKTWVHYIAAEEEDWDYAPLVLAPDDRSYKSQYLNNGPQRIGRKYKKVRFMAYTDETFKTREAIQHESGILGPLLYGEVGDTLLIIFKNQASRPYNIYPHGITDVRPLYSRRLPKGVKHLKDFPILPGEIFKYKWTVTVEDGPTKSDPRCLTRYYSSFVNMERDLASGLIGPLLICYKESVDQRGNQIMSDKRNVILFSVFDENRSWYLTENIQRFLPNPAGVQLEDPEFQASNIMHSINGYVFDSLQLSVCLHEVAYWYILSIGAQTDFLSVFFSGYTFKHKMVYEDTLTLFPFSGETVFMSMENPGLWILGCHNSDFRNRGMTALLKVSSCDKNTGDYYEDSYEDISAYMLSKNNAIEPRSFSQNPPVLKRHQREITRTTLQSDQEEIDYDDTISVEMKKEDFDIYDEDENQSPRSFQKKTRHYFIAAVERLWDYGMSSSPHVLRNRAQSGSVPQFKKVVFQEFTDGSFTQPLYRGELNEHLGLLGPYIRAEVEDNIMVTFRNQASRPYSFYSSLISYEEDQRQGAEPRKNFVKPNETKTYFWKVQHHMAPTKDEFDCKAWAYFSDVDLEKDVHSGLIGPLLVCHTNTLNPAHGRQVTVQEFALFFTIFDETKSWYFTENMERNCRAPCNIQMEDPTFKENYRFHAINGYIMDTLPGLVMAQDQRIRWYLLSMGSNENIHSIHFSGHVFTVRKKEEYKMALYNLYPGVFETVEMLPSKAGIWRVECLIGEHLHAGMSTLFLVYSNKCQTPLGMASGHIRDFQITASGQYGQWAPKLARLHYSGSINAWSTKEPFSWIKVDLLAPMIIHGIKTQGARQKFSSLYISQFIIMYSLDGKKWQTYRGNSTGTLMVFFGNVDSSGIKHNIFNPPIIARYIRLHPTHYSIRSTLRMELMGCDLNSCSMPLGMESKAISDAQITASSYFTNMFATWSPSKARLHLQGRSNAWRPQVNNPKEWLQVDFQKTMKVTGVTTQGVKSLLTSMYVKEFLISSSQDGHQWTLFFQNGKVKVFQGNQDSFTPVVNSLDPPLLTRYLRIHPQSWVHQIALRMEVLGCEAQDLY

SEQ ID NO: 2557 - DNA, 4371 bp, synthetic construct
  misc_feature 1..4371: note = Variant of human B-domain deleted Factor VIII
  source 1..4371: mol_type = other DNA
atgcagattgaactgtctacctgcttcttcctctgtttgctgaggttctgctttagcgccactagacggtactaccttggcgctgtggagctgtcctgggactatatgcagagtgatttgggagagcttcccgtcgacgcacgatttcctcctcgcgttccaaagtcatttcccttcaacacaagcgtggtgtacaagaagacgctcttcgtcgaattcaccgatcacctgttcaatatcgccaaacccagaccaccatggatgggtcttttggggcctaccatacaagcggaggtgtatgacacagttgttatcactctcaagaacatggcttctcatccggtaagtcttcacgcagtgggcgtgtcctactggaaagcttcagaaggagccgagtatgatgatcagacatcccagagggagaaagaagacgacaaggtatttccaggtgggtctcatacctatgtgtggcaagtgctcaaagagaatggccctatggcaagcgatccgctctgtttgacttacagctacctttcacacgttgacctcgtcaaggacctcaactccgggttgattggagccttgttggtatgcagggaaggatctcttgccaaagagaagacacagaccctccacaagtttatccttctctttgctgtgttcgatgagggcaaaagttggcatagcgaaacgaagaattccctcatgcaggatcgcgacgcagccagcgccagagcttggcccaagatgcacactgtgaacggatatgtcaataggtcacttcctggcttgattgggtgtcatcggaaaagtgtctactggcacgtgatcggaatggggacaacaccagaggtccactccatatttctcgaaggccataccttccttgttcgaaaccacagacaggcatccttggagatctctcccattacctttctcactgcccaaacgctccttatggacttgggtcagttccttctcttctgccatatcagctcacaccagcatgatggtatggaagcttatgtgaaagtcgacagttgtcctgaggagccacagttgcgcatgaagaataatgaagaagccgaggattacgacgacgatctcaccgattctgagatggacgtggtgaggtttgatgacgacaactctccctccttcattcaaatccggagcgtggcgaagaaacaccccaagacttgggtccactatatagcggcggaagaggaggattgggattacgctcctcttgtattggcaccagatgaccgctcatacaaaagccagtacctcaacaacggaccgcagagaattggccggaagtataagaaagtgcgatttatggcctatacagacgaaacctttaagacaagggaggccatccagcatgagagtgggattttgggacctcttctttacggcgaagttggtgataccctcctcatcatcttcaagaatcaagcttctcgcccctataacatttacccacacgggatcactgacgttaggcctttgtatagcagaagacttcccaaaggcgtgaagcatctcaaagacttccccattttgccaggcgagatctttaagtacaaatggaccgtcacagtggaagatggaccgactaaatcagaccctcgatgccttacgcggtactattcctccttcgtgaatatggagagagatttggcaagcggactcataggaccactcctcatctgttacaaggaatctgtagaccagaggggtaaccagattatgagtgataaacgcaatgtgatcctttttagcgtcttcgacgagaaccggtcctggtacttgaccgagaatatacaaaggttccttcccaaccccgcaggcgttcagttggaagaccctgagtttcaggccagcaatattatgcactcaatcaacggctatgtgtttgatagtctccagctttctgtttgcctccatgaagtagcctattggtacatcttgtcaattggtgctcaaacagacttcctctccgtcttcttctccggctacacctttaagcacaagatggtgtatgaggacactctcacactctttccattttctggagaaaccgtgttcatgagcatggagaatccaggcctttggatcttgggttgccacaacagtgattttcgcaatcggggaatgactgctctcctcaaagtcagcagctgtgataagaacacaggcgactattacgaagattcttacgaggacataagtgcctacttgttgtccaagaataacgccattgagcccagatcattctcccagaatcctcccgtgcttaaaaggcatcagcgcgaaatcaccagaactactcttcagtctgatcaagaggagattgactatgacgacaccataagcgtggaaatgaagaaggaggatttcgatatctatgacgaagatgagaaccagtctccgcggagctttcagaagaagacgcgacactacttcattgcagcagtcgaaaggctttgggactacggtatgtcatcatcccctcatgtgttgcgcaatagagctcagagtggaagtgttccacagttcaagaaagtcgtctttcaagagtttacagatggcagcttcacacagcctctctatcggggcgagcttaacgaacatttgggactccttggtccctatatccgagccgaagtggaggacaacattatggttacctttaggaatcaagcctctcgcccctacagcttctactcctccctcatcagttatgaggaggatcagagacaaggcgctgaaccacggaagaactttgtgaaaccgaatgagacgaagacctacttctggaaagtacagcaccacatggcccccacaaaagacgaattcgattgcaaagcatgggcgtatttttcagacgttgacttggagaaagatgtacattcaggacttattggtcctttgttggtgtgtcacactaacactctcaatccagcccatggcaggcaggtgacagtccaggaattcgctcttttctttaccatctttgatgagaccaagtcctggtacttcacggaaaacatggagcgcaattgcagagccccctgtaacatacagatggaggaccctacctttaaggaaaattatcggttccacgcaatcaacggatacattatggatacactccctggccttgtgatggctcaggaccaacgaatcaggtggtacctcctcagcatgggttctaatgagaacatacactccattcacttttcaggacatgtgttcactgtccggaagaaagaagagtataagatggccctctacaatttgtatccaggcgtgtttgagaccgttgaaatgcttccctctaaagctggcatctggagagtagagtgcttgatcggagaacatcttcacgcaggtatgagcaccttgttcctcgtgtacagcaacaaatgtcagaccccacttggcatggccagtggacacattcgcgactttcagatcacagcatctggccagtatggacaatgggccccaaagttggctcgcctccattactccggtagcataaatgcgtggtccactaaagaacctttcagctggattaaggtcgatcttcttgcccccatgatcatccacggcattaagacacagggagcgaggcagaaattctcctccctctacatctcacagttcattattatgtatagtttggacggcaagaagtggcaaacttatagaggtaacagtactggaacactcatggtgttcttcggcaacgttgatagctctggcatcaaacacaacatctttaatcctcccataatagctcggtacatcagattgcatccgacccactacagcattaggagtacactccgaatggagcttatgggttgcgacttgaattcctgttcaatgccactcggaatggagtctaaagccatctctgatgcacagataaccgccagtagctactttacgaacatgtttgctacgtggtcaccctctaaggcaaggcttcatttgcaaggccggtctaatgcctggagacctcaggtgaacaacccgaaagaatggctccaggtggactttcagaagaccatgaaagtaacaggtgtcactactcagggagttaagtccttgctcaccagcatgtatgtgaaggagttccttatttcctcatcacaagatggccaccagtggaccctcttctttcagaatggtaaggtcaaagtgtttcagggcaatcaagaccatttcacacccgtggtgaacagtcttgatcctccactcttgacacgataccttcgaatccatccacagtcttgggttcaccagattgcattgcgcatggaagtacttggatgcgaggctcaggacctctac

SEQ ID NO: 2558 - protein, 1457 aa, synthetic construct
  REGION 1..1457: note = Variant of human B-domain deleted Factor VIII
MQIELSTCFFLCLLRFCFSATRRYYLGAVELSWDYMQSDLGELPVDARFPPRVPKSFPFNTSVVYKKTLFVEFTDHLFNIAKPRPPWMGLLGPTIQAEVYDTVVITLKNMASHPVSLHAVGVSYWKASEGAEYDDQTSQREKEDDKVFPGGSHTYVWQVLKENGPMASDPLCLTYSYLSHVDLVKDLNSGLIGALLVCREGSLAKEKTQTLHKFILLFAVFDEGKSWHSETKNSLMQDRDAASARAWPKMHTVNGYVNRSLPGLIGCHRKSVYWHVIGMGTTPEVHSIFLEGHTFLVRNHRQASLEISPITFLTAQTLLMDLGQFLLFCHISSHQHDGMEAYVKVDSCPEEPQLRMKNNEEAEDYDDDLTDSEMDVVRFDDDNSPSFIQIRSVAKKHPKTWVHYIAAEEEDWDYAPLVLAPDDRSYKSQYLNNGPQRIGRKYKKVRFMAYTDETFKTREAIQHESGILGPLLYGEVGDTLLIIFKNQASRPYNIYPHGITDVRPLYSRRLPKGVKHLKDFPILPGEIFKYKWTVTVEDGPTKSDPRCLTRYYSSFVNMERDLASGLIGPLLICYKESVDQRGNQIMSDKRNVILFSVFDENRSWYLTENIQRFLPNPAGVQLEDPEFQASNIMHSINGYVFDSLQLSVCLHEVAYWYILSIGAQTDFLSVFFSGYTFKHKMVYEDTLTLFPFSGETVFMSMENPGLWILGCHNSDFRNRGMTALLKVSSCDKNTGDYYEDSYEDISAYLLSKNNAIEPRSFSQNPPVLKRHQREITRTTLQSDQEEIDYDDTISVEMKKEDFDIYDEDENQSPRSFQKKTRHYFIAAVERLWDYGMSSSPHVLRNRAQSGSVPQFKKVVFQEFTDGSFTQPLYRGELNEHLGLLGPYIRAEVEDNIMVTFRNQASRPYSFYSSLISYEEDQRQGAEPRKNFVKPNETKTYFWKVQHHMAPTKDEFDCKAWAYFSDVDLEKDVHSGLIGPLLVCHTNTLNPAHGRQVTVQEFALFFTIFDETKSWYFTENMERNCRAPCNIQMEDPTFKENYRFHAINGYIMDTLPGLVMAQDQRIRWYLLSMGSNENIHSIHFSGHVFTVRKKEEYKMALYNLYPGVFETVEMLPSKAGIWRVECLIGEHLHAGMSTLFLVYSNKCQTPLGMASGHIRDFQITASGQYGQWAPKLARLHYSGSINAWSTKEPFSWIKVDLLAPMIIHGIKTQGARQKFSSLYISQFIIMYSLDGKKWQTYRGNSTGTLMVFFGNVDSSGIKHNIFNPPIIARYIRLHPTHYSIRSTLRMELMGCDLNSCSMPLGMESKAISDAQITASSYFTNMFATWSPSKARLHLQGRSNAWRPQVNNPKEWLQVDFQKTMKVTGVTTQGVKSLLTSMYVKEFLISSSQDGHQWTLFFQNGKVKVFQGNQDHFTPVVNSLDPPLLTRYLRIHPQSWVHQIALRMEVLGCEAQDLY

SEQ ID NO: 2559 - DNA, 4371 bp, synthetic construct
  misc_feature 1..4371: note = Variant of human B-domain deleted Factor VIII
  source 1..4371: mol_type = other DNA
atgcagattgaactgtctacctgcttcttcctctgtttgctgaggttctgctttagcgccactagacggtactaccttggcgctgtggagctgtcctgggactatatgcagagtgatttgggagagcttcccgtcgacgcacgatttcctcctcgcgttccaaagtcatttcccttcaacacaagcgtggtgtacaagaagacgctcttcgtcgaattcaccgatcacctgttcaatatcgccaaacccagaccaccatggatgggtcttttggggcctaccatacaagcggaggtgtatgacacagttgttatcactctcaagaacatggcttctcatccggtaagtcttcacgcagtgggcgtgtcctactggaaagcttcagaaggagccgagtatgatgatcagacatcccagagggagaaagaagacgacaaggtatttccaggtgggtctcatacctatgtgtggcaagtgctcaaagagaatggccctatggcaagcgatccgctctgtttgacttacagctacctttcacacgttgacctcgtcaaggacctcaactccgggttgattggagccttgttggtatgcagggaaggatctcttgccaaagagaagacacagaccctccacaagtttatccttctctttgctgtgttcgatgagggcaaaagttggcatagcgaaacgaagaattccctcatgcaggatcgcgacgcagccagcgccagagcttggcccaagatgcacactgtgaacggatatgtcaataggtcacttcctggcttgattgggtgtcatcggaaaagtgtctactggcacgtgatcggaatggggacaacaccagaggtccactccatatttctcgaaggccataccttccttgttcgaaaccacagacaggcatccttggagatctctcccattacctttctcactgcccaaacgctccttatggacttgggtcagttccttctcttctgccatatcagctcacaccagcatgatggtatggaagcttatgtgaaagtcgacagttgtcctgaggagccacagttgcgcatgaagaataatgaagaagccgaggattacgacgacgatctcaccgattctgagatggacgtggtgaggtttgatgacgacaactctccctccttcattcaaatccggagcgtggcgaagaaacaccccaagacttgggtccactatatagcggcggaagaggaggattgggattacgctcctcttgtattggcaccagatgaccgctcatacaaaagccagtacctcaacaacggaccgcagagaattggccggaagtataagaaagtgcgatttatggcctatacagacgaaacctttaagacaagggaggccatccagcatgagagtgggattttgggacctcttctttacggcgaagttggtgataccctcctcatcatcttcaagaatcaagcttctcgcccctataacatttacccacacgggatcactgacgttaggcctttgtatagcagaagacttcccaaaggcgtgaagcatctcaaagacttccccattttgccaggcgagatctttaagtacaaatggaccgtcacagtggaagatggaccgactaaatcagaccctcgatgccttacgcggtactattcctccttcgtgaatatggagagagatttggcaagcggactcataggaccactcctcatctgttacaaggaatctgtagaccagaggggtaaccagattatgagtgataaacgcaatgtgatcctttttagcgtcttcgacgagaaccggtcctggtacttgaccgagaatatacaaaggttccttcccaaccccgcaggcgttcagttggaagaccctgagtttcaggccagcaatattatgcactcaatcaacggctatgtgtttgatagtctccagctttctgtttgcctccatgaagtagcctattggtacatcttgtcaattggtgctcaaacagacttcctctccgtcttcttctccggctacacctttaagcacaagatggtgtatgaggacactctcacactctttccattttctggagaaaccgtgttcatgagcatggagaatccaggcctttggatcttgggttgccacaacagtgattttcgcaatcggggaatgactgctctcctcaaagtcagcagctgtgataagaacacaggcgactattacgaagattcttacgaggacataagtgcctacttgttgtccaagaataacgccattgagcccagatcattctcccagaatcctcccgtgcttaaaaggcatcagcgcgaaatcaccagaactactcttcagtctgatcaagaggagattgactatgacgacaccataagcgtggaaatgaagaaggaggatttcgatatctatgacgaagatgagaaccagtctccgcggagctttcagaagaagacgcgacactacttcattgcagcagtcgaaaggctttgggactacggtatgtcatcatcccctcatgtgttgcgcaatagagctcagagtggaagtgttccacagttcaagaaagtcgtctttcaagagtttacagatggcagcttcacacagcctctctatcggggcgagcttaacgaacatttgggactccttggtccctatatccgagccgaagtggaggacaacattatggttacctttaggaatcaagcctctcgcccctacagcttctactcctccctcatcagttatgaggaggatcagagacaaggcgctgaaccacggaagaactttgtgaaaccgaatgagacgaagacctacttctggaaagtacagcaccacatggcccccacaaaagacgaattcgattgcaaagcatgggcgtatttttcagacgttgacttggagaaagatgtacattcaggacttattggtcctttgttggtgtgtcacactaacactctcaatccagcccatggcaggcaggtgacagtccaggaattcgctcttttctttaccatctttgatgagaccaagtcctggtacttcacggaaaacatggagcgcaattgcagagccccctgtaacatacagatggaggaccctacctttaaggaaaattatcggttccacgcaatcaacggatacattatggatacactccctggccttgtgatggctcaggaccaacgaatcaggtggtacctcctcagcatgggttctaatgagaacatacactccattcacttttcaggacatgtgttcactgtccggaagaaagaagagtataagatggccctctacaatttgtatccaggcgtgtttgagaccgttgaaatgcttccctctaaagctggcatctggagagtagagtgcttgatcggagaacatcttcacgcaggtatgagcaccttgttcctcgtgtacagcaacaaatgtcagaccccacttggcatggccagtggacacattcgcgactttcagatcacagcatctggccagtatggacaatgggccccaaagttggctcgcctccattactccggtagcataaatgcgtggtccactaaagaacctttcagctggattaaggtcgatcttcttgcccccatgatcatccacggcattaagacacagggagcgaggcagaaattctcctccctctacatctcacagttcattattatgtatagtttggacggcaagaagtggcaaacttatagaggtaacagtactggaacatgtatggtgttcttcggcaacgttgatagctctggcatcaaacacaacatctttaatcctcccataatagctcggtacatcagattgcatccgacccactacagcattaggagtacactccgaatggagcttatgggttgcgacttgaattcctgttcaatgccactcggaatggagtctaaagccatctctgatgcacagataaccgccagtagctactttacgaacatgtttgctacgtggtcaccctctaaggcaaggcttcatttgcaaggccggtctaatgcctggagacctcaggtgaacaacccgaaagaatggctccaggtggactttcagaagaccatgaaagtaacaggtgtcactactcagggagttaagtccttgctcaccagcatgtatgtgaaggagttccttatttcctcatcacaagatggccaccagtggaccctcttctttcagaatggtaaggtcaaagtgtttcagggcaatcaagacagcttcacacccgtggtgaacagtcttgatcctccactcttgacacgataccttcgaatccatccacagtcttgggttcaccagattgcattgcgcatggaagtacttggatgcgaggctcaggacctctac

SEQ ID NO: 2560 - protein, 1457 aa, synthetic construct
  REGION 1..1457: note = Variant of human B-domain deleted Factor VIII
MQIELSTCFFLCLLRFCFSATRRYYLGAVELSWDYMQSDLGELPVDARFPPRVPKSFPFNTSVVYKKTLFVEFTDHLFNIAKPRPPWMGLLGPTIQAEVYDTVVITLKNMASHPVSLHAVGVSYWKASEGAEYDDQTSQREKEDDKVFPGGSHTYVWQVLKENGPMASDPLCLTYSYLSHVDLVKDLNSGLIGALLVCREGSLAKEKTQTLHKFILLFAVFDEGKSWHSETKNSLMQDRDAASARAWPKMHTVNGYVNRSLPGLIGCHRKSVYWHVIGMGTTPEVHSIFLEGHTFLVRNHRQASLEISPITFLTAQTLLMDLGQFLLFCHISSHQHDGMEAYVKVDSCPEEPQLRMKNNEEAEDYDDDLTDSEMDVVRFDDDNSPSFIQIRSVAKKHPKTWVHYIAAEEEDWDYAPLVLAPDDRSYKSQYLNNGPQRIGRKYKKVRFMAYTDETFKTREAIQHESGILGPLLYGEVGDTLLIIFKNQASRPYNIYPHGITDVRPLYSRRLPKGVKHLKDFPILPGEIFKYKWTVTVEDGPTKSDPRCLTRYYSSFVNMERDLASGLIGPLLICYKESVDQRGNQIMSDKRNVILFSVFDENRSWYLTENIQRFLPNPAGVQLEDPEFQASNIMHSINGYVFDSLQLSVCLHEVAYWYILSIGAQTDFLSVFFSGYTFKHKMVYEDTLTLFPFSGETVFMSMENPGLWILGCHNSDFRNRGMTALLKVSSCDKNTGDYYEDSYEDISAYLLSKNNAIEPRSFSQNPPVLKRHQREITRTTLQSDQEEIDYDDTISVEMKKEDFDIYDEDENQSPRSFQKKTRHYFIAAVERLWDYGMSSSPHVLRNRAQSGSVPQFKKVVFQEFTDGSFTQPLYRGELNEHLGLLGPYIRAEVEDNIMVTFRNQASRPYSFYSSLISYEEDQRQGAEPRKNFVKPNETKTYFWKVQHHMAPTKDEFDCKAWAYFSDVDLEKDVHSGLIGPLLVCHTNTLNPAHGRQVTVQEFALFFTIFDETKSWYFTENMERNCRAPCNIQMEDPTFKENYRFHAINGYIMDTLPGLVMAQDQRIRWYLLSMGSNENIHSIHFSGHVFTVRKKEEYKMALYNLYPGVFETVEMLPSKAGIWRVECLIGEHLHAGMSTLFLVYSNKCQTPLGMASGHIRDFQITASGQYGQWAPKLARLHYSGSINAWSTKEPFSWIKVDLLAPMIIHGIKTQGARQKFSSLYISQFIIMYSLDGKKWQTYRGNSTGTCMVFFGNVDSSGIKHNIFNPPIIARYIRLHPTHYSIRSTLRMELMGCDLNSCSMPLGMESKAISDAQITASSYFTNMFATWSPSKARLHLQGRSNAWRPQVNNPKEWLQVDFQKTMKVTGVTTQGVKSLLTSMYVKEFLISSSQDGHQWTLFFQNGKVKVFQGNQDSFTPVVNSLDPPLLTRYLRIHPQSWVHQIALRMEVLGCEAQDLY

SEQ ID NO: 2561 - DNA, 4371 bp, synthetic construct
  misc_feature 1..4371: note = Variant of human B-domain deleted Factor VIII
  source 1..4371: mol_type = other DNA
atgcagattgaactgtctacctgcttcttcctctgtttgctgaggttctgctttagcgccactagacggtactaccttggcgctgtggagctgtcctgggactatatgcagagtgatttgggagagcttcccgtcgacgcacgatttcctcctcgcgttccaaagtcatttcccttcaacacaagcgtggtgtacaagaagacgctcttcgtcgaattcaccgatcacctgttcaatatcgccaaacccagaccaccatggatgggtcttttggggcctaccatacaagcggaggtgtatgacacagttgttatcactctcaagaacatggcttctcatccggtaagtcttcacgcagtgggcgtgtcctactggaaagcttcagaaggagccgagtatgatgatcagacatcccagagggagaaagaagacgacaaggtatttccaggtgggtctcatacctatgtgtggcaagtgctcaaagagaatggccctatggcaagcgatccgctctgtttgacttacagctacctttcacacgttgacctcgtcaaggacctcaactccgggttgattggagccttgttggtatgcagggaaggatctcttgccaaagagaagacacagaccctccacaagtttatccttctctttgctgtgttcgatgagggcaaaagttggcatagcgaaacgaagaattccctcatgcaggatcgcgacgcagccagcgccagagcttggcccaagatgcacactgtgaacggatatgtcaataggtcacttcctggcttgattgggtgtcatcggaaaagtgtctactggcacgtgatcggaatggggacaacaccagaggtccactccatatttctcgaaggccataccttccttgttcgaaaccacagacaggcatccttggagatctctcccattacctttctcactgcccaaacgctccttatggacttgggtcagttccttctcttctgccatatcagctcacaccagcatgatggtatggaagcttatgtgaaagtcgacagttgtcctgaggagccacagttgcgcatgaagaataatgaagaagccgaggattacgacgacgatctcaccgattctgagatggacgtggtgaggtttgatgacgacaactctccctccttcattcaaatccggagcgtggcgaagaaacaccccaagacttgggtccactatatagcggcggaagaggaggattgggattacgctcctcttgtattggcaccagatgaccgctcatacaaaagccagtacctcaacaacggaccgcagagaattggccggaagtataagaaagtgcgatttatggcctatacagacgaaacctttaagacaagggaggccatccagcatgagagtgggattttgggacctcttctttacggcgaagttggtgataccctcctcatcatcttcaagaatcaagcttctcgcccctataacatttacccacacgggatcactgacgttaggcctttgtatagcagaagacttcccaaaggcgtgaagcatctcaaagacttccccattttgccaggcgagatctttaagtacaaatggaccgtcacagtggaagatggaccgactaaatcagaccctcgatgccttacgcggtactattcctccttcgtgaatatggagagagatttggcaagcggactcataggaccactcctcatctgttacaaggaatctgtagaccagaggggtaaccagattatgagtgataaacgcaatgtgatcctttttagcgtcttcgacgagaaccggtcctggtacttgaccgagaatatacaaaggttccttcccaaccccgcaggcgttcagttggaagaccctgagtttcaggccagcaatattatgcactcaatcaacggctatgtgtttgatagtctccagctttctgtttgcctccatgaagtagcctattggtacatcttgtcaattggtgctcaaacagacttcctctccgtcttcttctccggctacacctttaagcacaagatggtgtatgaggacactctcacactctttccattttctggagaaaccgtgttcatgagcatggagaatccaggcctttggatcttgggttgccacaacagtgattttcgcaatcggggaatgactgctctcctcaaagtcagcagctgtgataagaacacaggcgactattacgaagattcttacgaggacataagtgcctacaagttgtccaagaataacgccattgagcccagatcattctcccagaatcctcccgtgcttaaaaggcatcagcgcgaaatcaccagaactactcttcagtctgatcaagaggagattgactatgacgacaccataagcgtggaaatgaagaaggaggatttcgatatctatgacgaagatgagaaccagtctccgcggagctttcagaagaagacgcgacactacttcattgcagcagtcgaaaggctttgggactacggtatgtcatcatcccctcatgtgttgcgcaatagagctcagagtggaagtgttccacagttcaagaaagtcgtctttcaagagtttacagatggcagcttcacacagcctctctatcggggcgagcttaacgaacatttgggactccttggtccctatatccgagccgaagtggaggacaacattatggttacctttaggaatcaagcctctcgcccctacagcttctactcctccctcatcagttatgaggaggatcagagacaaggcgctgaaccacggaagaactttgtgaaaccgaatgagacgaagacctacttctggaaagtacagcaccacatggcccccacaaaagacgaattcgattgcaaagcatgggcgtatttttcagacgttgacttggagaaagatgtacattcaggacttattggtcctttgttggtgtgtcacactaacactctcaatccagcccatggcaggcaggtgacagtccaggaattcgctcttttctttaccatctttgatgagaccaagtcctggtacttcacggaaaacatggagcgcaattgcagagccccctgtaacatacagatggaggaccctacctttaaggaaaattatcggttccacgcaatcaacggatacattatggatacactccctggccttgtgatggctcaggaccaacgaatcaggtggtacctcctcagcatgggttctaatgagaacatacactccattcacttttcaggacatgtgttcactgtccggaagaaagaagagtataagatggccctctacaatttgtatccaggcgtgtttgagaccgttgaaatgcttccctctaaagctggcatctggagagtagagtgcttgatcggagaacatcttcacgcaggtatgagcaccttgttcctcgtgtacagcaacaaatgtcagaccccacttggcatggccagtggacacattcgcgactttcagatcacagcatctggccagtatggacaatgggccccaaagttggctcgcctccattactccggtagcataaatgcgtggtccactaaagaacctttcagctggattaaggtcgatcttcttgcccccatgatcatccacggcattaagacacagggagcgaggcagaaattctcctccctctacatctcacagttcattattatgtatagtttggacggcaagaagtggcaaacttatagaggtaacagtactggaacactcatggtgttcttcggcaacgttgatagctctggcatcaaacacaacatctttaatcctcccataatagctcggtacatcagattgcatccgacccactacagcattaggagtacactccgaatggagcttatgggttgcgacttgaattcctgttcaatgccactcggaatggagtctaaagccatctctgatgcacagataaccgccagtagctactttacgaacatgtttgctacgtggtcaccctctaaggcaaggcttcatttgcaaggccggtctaatgcctggagacctcaggtgaacaacccgaaagaatggctccaggtggactttcagaagaccatgaaagtaacaggtgtcactactcagggagttaagtccttgctcaccagcatgtatgtgaaggagttccttatttcctcatcacaagatggccaccagtggaccctcttctttcagaatggtaaggtcaaagtgtttcagggcaatcaagacagcttcacacccgtggtgaacagtcttgatcctccactcttgacacgataccttcgaatccatccacagtcttgggttcaccagattgcattgcgcatggaagtacttggatgcgaggctcaggacctctac

SEQ ID NO: 2562 - protein, 1457 aa, synthetic construct
  REGION 1..1457: note = Variant of human B-domain deleted Factor VIII
MQIELSTCFFLCLLRFCFSATRRYYLGAVELSWDYMQSDLGELPVDARFPPRVPKSFPFNTSVVYKKTLFVEFTDHLFNIAKPRPPWMGLLGPTIQAEVYDTVVITLKNMASHPVSLHAVGVSYWKASEGAEYDDQTSQREKEDDKVFPGGSHTYVWQVLKENGPMASDPLCLTYSYLSHVDLVKDLNSGLIGALLVCREGSLAKEKTQTLHKFILLFAVFDEGKSWHSETKNSLMQDRDAASARAWPKMHTVNGYVNRSLPGLIGCHRKSVYWHVIGMGTTPEVHSIFLEGHTFLVRNHRQASLEISPITFLTAQTLLMDLGQFLLFCHISSHQHDGMEAYVKVDSCPEEPQLRMKNNEEAEDYDDDLTDSEMDVVRFDDDNSPSFIQIRSVAKKHPKTWVHYIAAEEEDWDYAPLVLAPDDRSYKSQYLNNGPQRIGRKYKKVRFMAYTDETFKTREAIQHESGILGPLLYGEVGDTLLIIFKNQASRPYNIYPHGITDVRPLYSRRLPKGVKHLKDFPILPGEIFKYKWTVTVEDGPTKSDPRCLTRYYSSFVNMERDLASGLIGPLLICYKESVDQRGNQIMSDKRNVILFSVFDENRSWYLTENIQRFLPNPAGVQLEDPEFQASNIMHSINGYVFDSLQLSVCLHEVAYWYILSIGAQTDFLSVFFSGYTFKHKMVYEDTLTLFPFSGETVFMSMENPGLWILGCHNSDFRNRGMTALLKVSSCDKNTGDYYEDSYEDISAYKLSKNNAIEPRSFSQNPPVLKRHQREITRTTLQSDQEEIDYDDTISVEMKKEDFDIYDEDENQSPRSFQKKTRHYFIAAVERLWDYGMSSSPHVLRNRAQSGSVPQFKKVVFQEFTDGSFTQPLYRGELNEHLGLLGPYIRAEVEDNIMVTFRNQASRPYSFYSSLISYEEDQRQGAEPRKNFVKPNETKTYFWKVQHHMAPTKDEFDCKAWAYFSDVDLEKDVHSGLIGPLLVCHTNTLNPAHGRQVTVQEFALFFTIFDETKSWYFTENMERNCRAPCNIQMEDPTFKENYRFHAINGYIMDTLPGLVMAQDQRIRWYLLSMGSNENIHSIHFSGHVFTVRKKEEYKMALYNLYPGVFETVEMLPSKAGIWRVECLIGEHLHAGMSTLFLVYSNKCQTPLGMASGHIRDFQITASGQYGQWAPKLARLHYSGSINAWSTKEPFSWIKVDLLAPMIIHGIKTQGARQKFSSLYISQFIIMYSLDGKKWQTYRGNSTGTLMVFFGNVDSSGIKHNIFNPPIIARYIRLHPTHYSIRSTLRMELMGCDLNSCSMPLGMESKAISDAQITASSYFTNMFATWSPSKARLHLQGRSNAWRPQVNNPKEWLQVDFQKTMKVTGVTTQGVKSLLTSMYVKEFLISSSQDGHQWTLFFQNGKVKVFQGNQDSFTPVVNSLDPPLLTRYLRIHPQSWVHQIALRMEVLGCEAQDLY

SEQ ID NO: 2563 - DNA, 4371 bp, synthetic construct
  misc_feature 1..4371: note = Variant of human B-domain deleted Factor VIII
  source 1..4371: mol_type = other DNA
atgcagattgaactgtctacctgcttcttcctctgtttgctgaggttctgctttagcgccactagacggtactaccttggcgctgtggagctgtcctgggactatatgcagagtgatttgggagagcttcccgtcgacgcacgatttcctcctcgcgttccaaagtcatttcccttcaacacaagcgtggtgtacaagaagacgctcttcgtcgaattcaccgatcacctgttcaatatcgccaaacccagaccaccatggatgggtcttttggggcctaccatacaagcggaggtgtatgacacagttgttatcactctcaagaacatggcttctcatccggtaagtcttcacgcagtgggcgtgtcctactggaaagcttcagaaggagccgagtatgatgatcagacatcccagagggagaaagaagacgacaaggtatttccaggtgggtctcatacctatgtgtggcaagtgctcaaagagaatggccctatggcaagcgatccgctctgtttgacttacagctacctttcacacgttgacctcgtcaaggacctcaactccgggttgattggagccttgttggtatgcagggaaggatctcttgccaaagagaagacacagaccctccacaagtttatccttctctttgctgtgttcgatgagggcaaaagttggcatagcgaaacgaagaattccctcatgcaggatcgcgacgcagccagcgccagagcttggcccaagatgcacactgtgaacggatatgtcaataggtcacttcctggcttgattgggtgtcatcggaaaagtgtctactggcacgtgatcggaatggggacaacaccagaggtccactccatatttctcgaaggccataccttccttgttcgaaaccacagacaggcatccttggagatctctcccattacctttctcactgcccaaacgctccttatggacttgggtcagttccttctcttctgccatatcagctcacaccagcatgatggtatggaagcttatgtgaaagtcgacagttgtcctgaggagccacagttgcgcatgaagaataatgaagaagccgaggattacgacgacgatctcaccgattctgagatggacgtggtgaggtttgatgacgacaactctccctccttcattcaaatccggagcgtggcgaagaaacaccccaagacttgggtccactatatagcggcggaagaggaggattgggattacgctcctcttgtattggcaccagatgaccgctcatacaaaagccagtacctcaacaacggaccgcagagaattggccggaagtataagaaagtgcgatttatggcctatacagacgaaacctttaagacaagggaggccatccagcatgagagtgggattttgggacctcttctttacggcgaagttggtgataccctcctcatcatcttcaagaatcaagcttctcgcccctataacatttacccacacgggatcactgacgttaggcctttgtatagcagaagacttcccaaaggcgtgaagcatctcaaagacttccccattttgccaggcgagatctttaagtacaaatggaccgtcacagtggaagatggaccgactaaatcagaccctcgatgccttacgcggtactattcctccttcgtgaatatggagagagatttggcaagcggactcataggaccactcctcatctgttacaaggaatctgtagaccagaggggtaaccagattatgagtgataaacgcaatgtgatcctttttagcgtcttcgacgagaaccggtcctggtacttgaccgagaatatacaaaggttccttcccaaccccgcaggcgttcagttggaagaccctgagtttcaggccagcaatattatgcactcaatcaacggctatgtgtttgatagtctccagctttctgtttgcctccatgaagtagcctattggtacatcttgtcaattggtgctcaaacagacttcctctccgtcttcttctccggctacacctttaagcacaagcaggtgtatgaggacactctcacactctttccattttctggagaaaccgtgttcatgagcatggagaatccaggcctttggatcttgggttgccacaacagtgattttcgcaatcggggaatgactgctctcctcaaagtcagcagctgtgataagaacacaggcgactattacgaagattcttacgaggacataagtgcctacttgttgtccaagaataacgccattgagcccagatcattctcccagaatcctcccgtgcttaaaaggcatcagcgcgaaatcaccagaactactcttcagtctgatcaagaggagattgactatgacgacaccataagcgtggaaatgaagaaggaggatttcgatatctatgacgaagatgagaaccagtctccgcggagctttcagaagaagacgcgacactacttcattgcagcagtcgaaaggctttgggactacggtatgtcatcatcccctcatgtgttgcgcaatagagctcagagtggaagtgttccacagttcaagaaagtcgtctttcaagagtttacagatggcagcttcacacagcctctctatcggggcgagcttaacgaacatttgggactccttggtccctatatccgagccgaagtggaggacaacattatggttacctttaggaatcaagcctctcgcccctacagcttctactcctccctcatcagttatgaggaggatcagagacaaggcgctgaaccacggaagaactttgtgaaaccgaatgagacgaagacctacttctggaaagtacagcaccacatggcccccacaaaagacgaattcgattgcaaagcatgggcgtatttttcagacgttgacttggagaaagatgtacattcaggacttattggtcctttgttggtgtgtcacactaacactctcaatccagcccatggcaggcaggtgacagtccaggaattcgctcttttctttaccatctttgatgagaccaagtcctggtacttcacggaaaacatggagcgcaattgcagagccccctgtaacatacagatggaggaccctacctttaaggaaaattatcggttccacgcaatcaacggatacattatggatacactccctggccttgtgatggctcaggaccaacgaatcaggtggtacctcctcagcatgggttctaatgagaacatacactccattcacttttcaggacatgtgttcactgtccggaagaaagaagagtataagatggccctctacaatttgtatccaggcgtgtttgagaccgttgaaatgcttccctctaaagctggcatctggagagtagagtgcttgatcggagaacatcttcacgcaggtatgagcaccttgttcctcgtgtacagcaacaaatgtcagaccccacttggcatggccagtggacacattcgcgactttcagatcacagcatctggccagtatggacaatgggccccaaagttggctcgcctccattactccggtagcataaatgcgtggtccactaaagaacctttcagctggattaaggtcgatcttcttgcccccatgatcatccacggcattaagacacagggagcgaggcagaaattctcctccctctacatctcacagttcattattatgtatagtttggacggcaagaagtggcaaacttatagaggtaacagtactggaacactcatggtgttcttcggcaacgttgatagctctggcatcaaacacaacatctttaatcctcccataatagctcggtacatcagattgcatccgacccactacagcattaggagtacactccgaatggagcttatgggttgcgacttgaattcctgttcaatgccactcggaatggagtctaaagccatctctgatgcacagataaccgccagtagctactttacgaacatgtttgctacgtggtcaccctctaaggcaaggcttcatttgcaaggccggtctaatgcctggagacctcaggtgaacaacccgaaagaatggctccaggtggactttcagaagaccatgaaagtaacaggtgtcactactcagggagttaagtccttgctcaccagcatgtatgtgaaggagttccttatttcctcatcacaagatggccaccagtggaccctcttctttcagaatggtaaggtcaaagtgtttcagggcaatcaagacagcttcacacccgtggtgaacagtcttgatcctccactcttgacacgataccttcgaatccatccacagtcttgggttcaccagattgcattgcgcatggaagtacttggatgcgaggctcaggacctctac

SEQ ID NO: 2564 - protein, 1457 aa, synthetic construct
  REGION 1..1457: note = Variant of human B-domain deleted Factor VIII
MQIELSTCFFLCLLRFCFSATRRYYLGAVELSWDYMQSDLGELPVDARFPPRVPKSFPFNTSVVYKKTLFVEFTDHLFNIAKPRPPWMGLLGPTIQAEVYDTVVITLKNMASHPVSLHAVGVSYWKASEGAEYDDQTSQREKEDDKVFPGGSHTYVWQVLKENGPMASDPLCLTYSYLSHVDLVKDLNSGLIGALLVCREGSLAKEKTQTLHKFILLFAVFDEGKSWHSETKNSLMQDRDAASARAWPKMHTVNGYVNRSLPGLIGCHRKSVYWHVIGMGTTPEVHSIFLEGHTFLVRNHRQASLEISPITFLTAQTLLMDLGQFLLFCHISSHQHDGMEAYVKVDSCPEEPQLRMKNNEEAEDYDDDLTDSEMDVVRFDDDNSPSFIQIRSVAKKHPKTWVHYIAAEEEDWDYAPLVLAPDDRSYKSQYLNNGPQRIGRKYKKVRFMAYTDETFKTREAIQHESGILGPLLYGEVGDTLLIIFKNQASRPYNIYPHGITDVRPLYSRRLPKGVKHLKDFPILPGEIFKYKWTVTVEDGPTKSDPRCLTRYYSSFVNMERDLASGLIGPLLICYKESVDQRGNQIMSDKRNVILFSVFDENRSWYLTENIQRFLPNPAGVQLEDPEFQASNIMHSINGYVFDSLQLSVCLHEVAYWYILSIGAQTDFLSVFFSGYTFKHKQVYEDTLTLFPFSGETVFMSMENPGLWILGCHNSDFRNRGMTALLKVSSCDKNTGDYYEDSYEDISAYLLSKNNAIEPRSFSQNPPVLKRHQREITRTTLQSDQEEIDYDDTISVEMKKEDFDIYDEDENQSPRSFQKKTRHYFIAAVERLWDYGMSSSPHVLRNRAQSGSVPQFKKVVFQEFTDGSFTQPLYRGELNEHLGLLGPYIRAEVEDNIMVTFRNQASRPYSFYSSLISYEEDQRQGAEPRKNFVKPNETKTYFWKVQHHMAPTKDEFDCKAWAYFSDVDLEKDVHSGLIGPLLVCHTNTLNPAHGRQVTVQEFALFFTIFDETKSWYFTENMERNCRAPCNIQMEDPTFKENYRFHAINGYIMDTLPGLVMAQDQRIRWYLLSMGSNENIHSIHFSGHVFTVRKKEEYKMALYNLYPGVFETVEMLPSKAGIWRVECLIGEHLHAGMSTLFLVYSNKCQTPLGMASGHIRDFQITASGQYGQWAPKLARLHYSGSINAWSTKEPFSWIKVDLLAPMIIHGIKTQGARQKFSSLYISQFIIMYSLDGKKWQTYRGNSTGTLMVFFGNVDSSGIKHNIFNPPIIARYIRLHPTHYSIRSTLRMELMGCDLNSCSMPLGMESKAISDAQITASSYFTNMFATWSPSKARLHLQGRSNAWRPQVNNPKEWLQVDFQKTMKVTGVTTQGVKSLLTSMYVKEFLISSSQDGHQWTLFFQNGKVKVFQGNQDSFTPVVNSLDPPLLTRYLRIHPQSWVHQIALRMEVLGCEAQDLY

SEQ ID NO: 2565 - DNA, 4371 bp, synthetic construct
  misc_feature 1..4371: note = Variant of human B-domain deleted Factor VIII
  source 1..4371: mol_type = other DNA
atgcagattgaactgtctacctgcttcttcctctgtttgctgaggttctgctttagcgccactagacggtactaccttggcgctgtggagctgtcctgggactatatgcagagtgatttgggagagcttcccgtcgacgcacgatttcctcctcgcgttccaaagtcatttcccttcaacacaagcgtggtgtacaagaagacgctcttcgtcgaattcaccgatcacctgttcaatatcgccaaacccagaccaccatggatgggtcttttggggcctaccatacaagcggaggtgtatgacacagttgttatcactctcaagaacatggcttctcatccggtaagtcttcacgcagtgggcgtgtcctactggaaagcttcagaaggagccgagtatgatgatcagacatcccagagggagaaagaagacgacaaggtatttccaggtgggtctcatacctatgtgtggcaagtgctcaaagagaatggccctatggcaagcgatccgctctgtttgacttacagctacctttcacacgttgacctcgtcaaggacctcaactccgggttgattggagccttgttggtatgcagggaaggatctcttgccaaagagaagacacagaccctccacaagtttatccttctctttgctgtgttcgatgagggcaaaagttggcatagcgaaacgaagaattccctcatgcaggatcgcgacgcagccagcgccagagcttggcccaagatgcacactgtgaacggatatgtcaataggtcacttcctggcttgattgggtgtcatcggaaaagtgtctactggcacgtgatcggaatggggacaacaccagaggtccactccatatttctcgaaggccataccttccttgttcgaaaccacagacaggcatccttggagatctctcccattacctttctcactgcccaaacgctccttatggacttgggtcagttccttctcttctgccatatcagctcacaccagcatgatggtatggaagcttatgtgaaagtcgacagttgtcctgaggagccacagttgcgcatgaagaataatgaagaagccgaggattacgacgacgatctcaccgattctgagatggacgtggtgaggtttgatgacgacaactctccctccttcattcaaatccggagctatgcgaagaaacaccccaagacttgggtccactatatagcggcggaagaggaggattgggattacgctcctcttgtattggcaccagatgaccgctcatacaaaagccagtacctcaacaacggaccgcagagaattggccggaagtataagaaagtgcgatttatggcctatacagacgaaacctttaagacaagggaggccatccagcatgagagtgggattttgggacctcttctttacggcgaagttggtgataccctcctcatcatcttcaagaatcaagcttctcgcccctataacatttacccacacgggatcactgacgttaggcctttgtatagcagaagacttcccaaaggcgtgaagcatctcaaagacttccccattttgccaggcgagatctttaagtacaaatggaccgtcacagtggaagatggaccgactaaatcagaccctcgatgccttacgcggtactattcctccttcgtgaatatggagagagatttggcaagcggactcataggaccactcctcatctgttacaaggaatctgtagaccagaggggtaaccagattatgagtgataaacgcaatgtgatcctttttagcgtcttcgacgagaaccggtcctggtacttgaccgagaatatacaaaggttccttcccaaccccgcaggcgttcagttggaagaccctgagtttcaggccagcaatattatgcactcaatcaacggctatgtgtttgatagtctccagctttctgtttgcctccatgaagtagcctattggtacatcttgtcaattggtgctcaaacagacttcctctccgtcttcttctccggctacacctttaagcacaagatggtgtatgaggacactctcacactctttccattttctggagaaaccgtgttcatgagcatggagaatccaggcctttggatcttgggttgccacaacagtgattttcgcaatcggggaatgactgctctcctcaaagtcagcagctgtgataagaacacaggcgactattacgaagattcttacgaggacataagtgcctacttgttgtccaagaataacgccattgagcccagatcattctcccagaatcctcccgtgcttaaaaggcatcagcgcgaaatcaccagaactactcttcagtctgatcaagaggagattgactatgacgacaccataagcgtggaaatgaagaaggaggatttcgatatctatgacgaagatgagaaccagtctccgcggagctttcagaagaagacgcgacactacttcattgcagcagtcgaaaggctttgggactacggtatgtcatcatcccctcatgtgttgcgcaatagagctcagagtggaagtgttccacagttcaagaaagtcgtctttcaagagtttacagatggcagcttcacacagcctctctatcggggcgagcttaacgaacatttgggactccttggtccctatatccgagccgaagtggaggacaacattatggttacctttaggaatcaagcctctcgcccctacagcttctactcctccctcatcagttatgaggaggatcagagacaaggcgctgaaccacggaagaactttgtgaaaccgaatgagacgaagacctacttctggaaagtacagcaccacatggcccccacaaaagacgaattcgattgcaaagcatgggcgtatttttcagacgttgacttggagaaagatgtacattcaggacttattggtcctttgttggtgtgtcacactaacactctcaatccagcccatggcaggcaggtgacagtccaggaattcgctcttttctttaccatctttgatgagaccaagtcctggtacttcacggaaaacatggagcgcaattgcagagccccctgtaacatacagatggaggaccctacctttaaggaaaattatcggttccacgcaatcaacggatacattatggatacactccctggccttgtgatggctcaggaccaacgaatcaggtggtacctactcagcatgggttctaatgagaacatacactccattcacttttcaggacatgtgttcactgtccggaagaaagaagagtataagatggccctctacaatttgtatccaggcgtgtttgagaccgttgaaatgcttccctctaaagctggcatctggagagtagagtgcttgatcggagaacatcttcacgcaggtatgagcaccttgttcctcgtgtacagcaacaaatgtcagaccccacttggcatggccagtggacacattcgcgactttcagatcacagcatctggccagtatggacaatgggccccaaagttggctcgcctccattactccggtagcataaatgcgtggtccactaaagaacctttcagctggattaaggtcgatcttcttgcccccatgatcatccacggcattaagacacagggagcgaggcagaaattctcctccctctacatctcacagttcattattatgtatagtttggacggcaagaagtggcaaacttatagaggtaacagtactggaacactcatggtgttcttcggcaacgttgatagctctggcatcaaacacaacatctttaatcctcccataatagctcggtacatcagattgcatccgacccactacagcattaggagtacactccgaatggagcttatgggttgcgacttgaattcctgttcaatgccactcggaatggagtctaaagccatctctgatgcacagataaccgccagtagctactttacgaacatgtttgctacgtggtcaccctctaaggcaaggcttcatttgcaaggccggtctaatgcctggagacctcaggtgaacaacccgaaagaatggctccaggtggactttcagaagaccatgaaagtaacaggtgtcactactcagggagttaagtccttgctcaccagcatgtatgtgaaggagttccttatttcctcatcacaagatggccaccagtggaccctcttctttcagaatggtaaggtcaaagtgtttcagggcaatcaagacagcttcacacccgtggtgaacagtcttgatcctccactcttgacacgataccttcgaatccatccacagtcttgggttcaccagattgcattgcgcatggaagtacttggatgcgaggctcaggacctctac

SEQ ID NO: 2566 - protein, 1457 aa, synthetic construct
  REGION 1..1457: note = Variant of human B-domain deleted Factor VIII
MQIELSTCFFLCLLRFCFSATRRYYLGAVELSWDYMQSDLGELPVDARFPPRVPKSFPFNTSVVYKKTLFVEFTDHLFNIAKPRPPWMGLLGPTIQAEVYDTVVITLKNMASHPVSLHAVGVSYWKASEGAEYDDQTSQREKEDDKVFPGGSHTYVWQVLKENGPMASDPLCLTYSYLSHVDLVKDLNSGLIGALLVCREGSLAKEKTQTLHKFILLFAVFDEGKSWHSETKNSLMQDRDAASARAWPKMHTVNGYVNRSLPGLIGCHRKSVYWHVIGMGTTPEVHSIFLEGHTFLVRNHRQASLEISPITFLTAQTLLMDLGQFLLFCHISSHQHDGMEAYVKVDSCPEEPQLRMKNNEEAEDYDDDLTDSEMDVVRFDDDNSPSFIQIRSYAKKHPKTWVHYIAAEEEDWDYAPLVLAPDDRSYKSQYLNNGPQRIGRKYKKVRFMAYTDETFKTREAIQHESGILGPLLYGEVGDTLLIIFKNQASRPYNIYPHGITDVRPLYSRRLPKGVKHLKDFPILPGEIFKYKWTVTVEDGPTKSDPRCLTRYYSSFVNMERDLASGLIGPLLICYKESVDQRGNQIMSDKRNVILFSVFDENRSWYLTENIQRFLPNPAGVQLEDPEFQASNIMHSINGYVFDSLQLSVCLHEVAYWYILSIGAQTDFLSVFFSGYTFKHKMVYEDTLTLFPFSGETVFMSMENPGLWILGCHNSDFRNRGMTALLKVSSCDKNTGDYYEDSYEDISAYLLSKNNAIEPRSFSQNPPVLKRHQREITRTTLQSDQEEIDYDDTISVEMKKEDFDIYDEDENQSPRSFQKKTRHYFIAAVERLWDYGMSSSPHVLRNRAQSGSVPQFKKVVFQEFTDGSFTQPLYRGELNEHLGLLGPYIRAEVEDNIMVTFRNQASRPYSFYSSLISYEEDQRQGAEPRKNFVKPNETKTYFWKVQHHMAPTKDEFDCKAWAYFSDVDLEKDVHSGLIGPLLVCHTNTLNPAHGRQVTVQEFALFFTIFDETKSWYFTENMERNCRAPCNIQMEDPTFKENYRFHAINGYIMDTLPGLVMAQDQRIRWYLLSMGSNENIHSIHFSGHVFTVRKKEEYKMALYNLYPGVFETVEMLPSKAGIWRVECLIGEHLHAGMSTLFLVYSNKCQTPLGMASGHIRDFQITASGQYGQWAPKLARLHYSGSINAWSTKEPFSWIKVDLLAPMIIHGIKTQGARQKFSSLYISQFIIMYSLDGKKWQTYRGNSTGTLMVFFGNVDSSGIKHNIFNPPIIARYIRLHPTHYSIRSTLRMELMGCDLNSCSMPLGMESKAISDAQITASSYFTNMFATWSPSKARLHLQGRSNAWRPQVNNPKEWLQVDFQKTMKVTGVTTQGVKSLLTSMYVKEFLISSSQDGHQWTLFFQNGKVKVFQGNQDSFTPVVNSLDPPLLTRYLRIHPQSWVHQIALRMEVLGCEAQDLY

SEQ ID NO: 2567 - DNA, 4371 bp, synthetic construct
  misc_feature 1..4371: note = Variant of human B-domain deleted Factor VIII
  source 1..4371: mol_type = other DNA
atgcagattgaactgtctacctgcttcttcctctgtttgctgaggttctgctttagcgccactagacggtactaccttggcgctgtggagctgtcctgggactatatgcagagtgatttgggagagcttcccgtcgacgcacgatttcctcctcgcgttccaaagtcatttcccttcaacacaagcgtggtgtacaagaagacgctcttcgtcgaattcaccgatcacctgttcaatatcgccaaacccagaccaccatggatgggtcttttggggcctaccatacaagcggaggtgtatgacacagttgttatcactctcaagaacatggcttctcatccggtaagtcttcacgcagtgggcgtgtcctactggaaagcttcagaaggagccgagtatgatgatcagacatcccagagggagaaagaagacgacaaggtatttccaggtgggtctcatacctatgtgtggcaagtgctcaaagagaatggccctatggcaagcgatccgctctgtttgacttacagctacctttcacacgttgacctcgtcaaggacctcaactccgggttgattggagccttgttggtatgcagggaaggatctcttgccaaagagaagacacagaccctccacaagtttatccttctctttgctgtgttcgatgagggcaaaagttggcatagcgaaacgaagaattccctcatgcaggatcgcgacgcagccagcgccagagcttggcccaagatgcacactgtgaacggatatgtcaataggtcacttcctggcttgattgggtgtcatcggaaaagtgtctactggcacgtgatcggaatggggacaacaccagaggtccactccatatttctcgaaggccataccttccttgttcgaaaccacagacaggcatccttggagatctctcccattacctttctcactgcccaaacgctccttatggacttgggtcagttccttctcttctgccatatcagctcacaccagcatgatggtatggaagcttatgtgaaagtcgacagttgtcctgaggagccacagttgcgcatgaagaataatgaagaagccgaggattacgacgacgatctcaccgattctgagatggacgtggtgaggtttgatgacgacaactctccctccttcattcaaatccggagcgtggcgaagaaacaccccaagacttgggtccactatatagcggcggaagaggaggattgggattacgctcctcttgtattggcaccagatgaccgctcatacaaaagccagtacctcaacaacggaccgcagagaattggccggaagtataagaaagtgcgatttatggcctatacagacgaaacctttaagacaagggaggccatccagcatgagagtgggattttgggacctcttctttacggcgaagttggtgataccctcctcatcatcttcaagaatcaagcttctcgcccctataacatttacccacacgggatcactgacgttaggcctttgtatagcagaagacttcccaaaggcgtgaagcatctcaaagacttccccattttgccaggcgagatctttaagtacaaatggaccgtcacagtggaagatggaccgactaaatcagaccctcgatgccttacgcggtactattcctccttcgtgaatatggagagagatttggcaagcggactcataggaccactcctcatctgttacaaggaatctgtagaccagaggggtaaccagattatgagtgataaacgcaatgtgatcctttttagcgtcttcgacgagaaccggtcctggtacttgaccgagaatatacaaaggttccttcccaaccccgcaggcgttcagttggaagaccctgagtttcaggccagcaatattatgcactcaatcaacggctatgtgtttgatagtctccagctttctgtttgcctccatgaagtagcctattggtacatcttgtcaattggtgctcaaacagacttcctctccgtcttcttctccggctacacctttaagcacaagatggtgtatgaggacactctcacactctttccattttctggagaaaccgtgttcatgagcatggagaatccaggcctttggatcttgggttgccacaacagtgattttcgcaatcggggaatgactgctctcctcaaagtcagcagctgtgataagaacacaggcgactatcatgaagattcttacgaggacataagtgcctacttgttgtccaagaataacgccattgagcccagatcattctcccagaatcctcccgtgcttaaaaggcatcagcgcgaaatcaccagaactactcttcagtctgatcaagaggagattgactatgacgacaccataagcgtggaaatgaagaaggaggatttcgatatctatgacgaagatgagaaccagtctccgcggagctttcagaagaagacgcgacactacttcattgcagcagtcgaaaggctttgggactacggtatgtcatcatcccctcatgtgttgcgcaatagagctcagagtggaagtgttccacagttcaagaaagtcgtctttcaagagtttacagatggcagcttcacacagcctctctatcggggcgagcttaacgaacatttgggactccttggtccctatatccgagccgaagtggaggacaacattatggttacctttaggaatcaagcctctcgcccctacagcttctactcctccctcatcagttatgaggaggatcagagacaaggcgctgaaccacggaagaactttgtgaaaccgaatgagacgaagacctacttctggaaagtacagcaccacatggcccccacaaaagacgaattcgattgcaaagcatgggcgtatttttcagacgttgacttggagaaagatgtacattcaggacttattggtcctttgttggtgtgtcacactaacactctcaatccagcccatggcaggcaggtgacagtccaggaattcgctcttttctttaccatctttgatgagaccaagtcctggtacttcacggaaaacatggagcgcaattgcagagccccctgtaacatacagatggaggaccctacctttaaggaaaattatcggttccacgcaatcaacggatacattatggatacactccctggccttgtgatggctcaggaccaacgaatcaggtggtacctcctcagcatgggttctaatgagaacatacactccattcacttttcaggacatgtgttcactgtccggaagaaagaagagtataagatggccctctacaatttgtatccaggcgtgtttgagaccgttgaaatgcttccctctaaagctggcatctggagagtagagtgcttgatcggagaacatcttcacgcaggtatgagcaccttgttcctcgtgtacagcaacaaatgtcagaccccacttggcatggccagtggacacattcgcgactttcagatcacagcatctggccagtatggacaatgggccccaaagttggctcgcctccattactccggtagcataaatgcgtggtccactaaagaacctttcagctggattaaggtcgatcttcttgcccccatgatcatccacggcattaagacacagggagcgaggcagaaattctcctccctctacatctcacagttcattattatgtatagtttggacggcaagaagtggcaaacttatagaggtaacagtactggaacactcatggtgttcttcggcaacgttgatagctctggcatcaaacacaacatctttaatcctcccataatagctcggtacatcagattgcatccgacccactacagcattaggagtacactccgaatggagcttatgggttgcgacttgaattcctgttcaatgccactcggaatggagtctaaagccatctctgatgcacagataaccgccagtagctactttacgaacatgtttgctacgtggtcaccctctaaggcaaggcttcatttgcaaggccggtctaatgcctggagacctcaggtgaacaacccgaaagaatggctccaggtggactttcagaagaccatgaaagtaacaggtgtcactactcagggagttaagtccttgctcaccagcatgtatgtgaaggagttccttatttcctcatcacaagatggccaccagtggaccctcttctttcagaatggtaaggtcaaagtgtttcagggcaatcaagacagcttcacacccgtggtgaacagtcttgatcctccactcttgacacgataccttcgaatccatccacagtcttgggttcaccagattgcattgcgcatggaagtacttggatgcgaggctcaggacctctac

SEQ ID NO: 2568 - protein, 1457 aa, synthetic construct
  REGION 1..1457: note = Variant of human B-domain deleted Factor VIII
MQIELSTCFFLCLLRFCFSATRRYYLGAVELSWDYMQSDLGELPVDARFPPRVPKSFPFNTSVVYKKTLFVEFTDHLFNIAKPRPPWMGLLGPTIQAEVYDTVVITLKNMASHPVSLHAVGVSYWKASEGAEYDDQTSQREKEDDKVFPGGSHTYVWQVLKENGPMASDPLCLTYSYLSHVDLVKDLNSGLIGALLVCREGSLAKEKTQTLHKFILLFAVFDEGKSWHSETKNSLMQDRDAASARAWPKMHTVNGYVNRSLPGLIGCHRKSVYWHVIGMGTTPEVHSIFLEGHTFLVRNHRQASLEISPITFLTAQTLLMDLGQFLLFCHISSHQHDGMEAYVKVDSCPEEPQLRMKNNEEAEDYDDDLTDSEMDVVRFDDDNSPSFIQIRSVAKKHPKTWVHYIAAEEEDWDYAPLVLAPDDRSYKSQYLNNGPQRIGRKYKKVRFMAYTDETFKTREAIQHESGILGPLLYGEVGDTLLIIFKNQASRPYNIYPHGITDVRPLYSRRLPKGVKHLKDFPILPGEIFKYKWTVTVEDGPTKSDPRCLTRYYSSFVNMERDLASGLIGPLLICYKESVDQRGNQIMSDKRNVILFSVFDENRSWYLTENIQRFLPNPAGVQLEDPEFQASNIMHSINGYVFDSLQLSVCLHEVAYWYILSIGAQTDFLSVFFSGYTFKHKMVYEDTLTLFPFSGETVFMSMENPGLWILGCHNSDFRNRGMTALLKVSSCDKNTGDYHEDSYEDISAYLLSKNNAIEPRSFSQNPPVLKRHQREITRTTLQSDQEEIDYDDTISVEMKKEDFDIYDEDENQSPRSFQKKTRHYFIAAVERLWDYGMSSSPHVLRNRAQSGSVPQFKKVVFQEFTDGSFTQPLYRGELNEHLGLLGPYIRAEVEDNIMVTFRNQASRPYSFYSSLISYEEDQRQGAEPRKNFVKPNETKTYFWKVQHHMAPTKDEFDCKAWAYFSDVDLEKDVHSGLIGPLLVCHTNTLNPAHGRQVTVQEFALFFTIFDETKSWYFTENMERNCRAPCNIQMEDPTFKENYRFHAINGYIMDTLPGLVMAQDQRIRWYLLSMGSNENIHSIHFSGHVFTVRKKEEYKMALYNLYPGVFETVEMLPSKAGIWRVECLIGEHLHAGMSTLFLVYSNKCQTPLGMASGHIRDFQITASGQYGQWAPKLARLHYSGSINAWSTKEPFSWIKVDLLAPMIIHGIKTQGARQKFSSLYISQFIIMYSLDGKKWQTYRGNSTGTLMVFFGNVDSSGIKHNIFNPPIIARYIRLHPTHYSIRSTLRMELMGCDLNSCSMPLGMESKAISDAQITASSYFTNMFATWSPSKARLHLQGRSNAWRPQVNNPKEWLQVDFQKTMKVTGVTTQGVKSLLTSMYVKEFLISSSQDGHQWTLFFQNGKVKVFQGNQDSFTPVVNSLDPPLLTRYLRIHPQSWVHQIALRMEVLGCEAQDLY

SEQ ID NO: 2569 - DNA, 4371 bp, synthetic construct
  misc_feature 1..4371: note = Variant of human B-domain deleted Factor VIII
  source 1..4371: mol_type = other DNA
atgcagattgaactgtctacctgcttcttcctctgtttgctgaggttctgctttagcgccactagacggtactaccttggcgctgtggagctgtcctgggactatatgcagagtgatttgggagagcttcccgtcgacgcacgatttcctcctcgcgttccaaagtcatttcccttcaacacaagcgtggtgtacaagaagacgctcttcgtcgaattcaccgatcacctgttcaatatcgccaaacccagaccaccatggatgggtcttttggggcctaccatacaagcggaggtgtatgacacagttgttatcactctcaagaacatggcttctcatccggtaagtcttcacgcagtgggcgtgtcctactggaaagcttcagaaggagccgagtatgatgatcagacatcccagagggagaaagaagacgacaaggtatttccaggtgggtctcatacctatgtgtggcaagtgctcaaagagaatggccctatggcaagcgatccgctctgtttgacttacagctacctttcacacgttgacctcgtcaaggacctcaactccgggttgattggagccttgttggtatgcagggaaggatctcttgccaaagagaagacacagaccctccacaagtttatccttctctttgctgtgttcgatgagggcaaaagttggcatagcgaaacgaagaattccctcatgcaggatcgcgacgcagccagcgccagagcttggcccaagatgcacactgtgaacggatatgtcaataggtcacttcctggcttgattgggtgtcatcggaaaagtgtctactggcacgtgatcggaatggggacaacaccagaggtccactccatatttctcgaaggccataccttccttgttcgaaaccacagacaggcatccttggagatctctcccattacctttctcactgcccaaacgctccttatggacttgggtcagttccttctcttctgccatatcagctcacaccagcatgatggtatggaagcttatgtgaaagtcgacagttgtcctgaggagccacagttgcgcatgaagaataatgaagaagccgaggattacgacgacgatctcaccgattctgagatggacgtggtgaggtttgatgacgacaactctccctccttcattcaaatccggagcgtggcgaagaaacaccccaagacttgggtccactatatagcggcggaagaggaggattgggattacgctcctcttgtattggcaccagatgaccgctcatacaaaagccagtacctcaacaacggaccgcagagaattggccggaagtataagaaagtgcgatttatggcctatacagacgaaacctttaagacaagggaggccatccagcatgagagtgggattttgggacctcttctttacggcgaagttggtgataccctcctcatcatcttcaagaatcaagcttctcgcccctataacatttacccacacgggatcactgacgttaggcctttgtatagcagaagacttcccaaaggcgtgaagcatctcaaagacttccccattttgccaggcgagatctttaagtacaaatggaccgtcacagtggaagatggaccgactaaatcagaccctcgatgccttacgcggtactattcctccttcgtgaatatggagagagatttggcaagcggactcataggaccactcctcatctgttacaaggaatctgtagaccagaggggtaaccagattatgagtgataaacgcaatgtgatcctttttagcgtcttcgacgagaaccggtcctggtacttgaccgagaatatacaaaggttccttcccaaccccgcaggcgttcagttggaagaccctgagtttcaggccagcaatattatgcactcaatcaacggctatgtgtttgatagtctccagctttctgtttgcctccatgaagtagcctattggtacatcttgtcaattggtgctcaaacagacttcctctccgtcttcttctccggctacacctttaagcacaagatggtgtatgaggacactctcacactctttccattttctggagaaaccgtgttcatgagcatggagaatccaggcctttggatcttgggttgccacaacagtgattttcgcaatcggggaatgactgctctcctcaaagtcagcagctgtgataagaacacaggcgactattacgaagattcttacgaggacataagtgcctacttgtcgtccaagaataacgccattgagcccagatcattctcccagaatcctcccgtgcttaaaaggcatcagcgcgaaatcaccagaactactcttcagtctgatcaagaggagattgactatgacgacaccataagcgtggaaatgaagaaggaggatttcgatatctatgacgaagatgagaaccagtctccgcggagctttcagaagaagacgcgacactacttcattgcagcagtcgaaaggctttgggactacggtatgtcatcatcccctcatgtgttgcgcaatagagctcagagtggaagtgttccacagttcaagaaagtcgtctttcaagagtttacagatggcagcttcacacagcctctctatcggggcgagcttaacgaacatttgggactccttggtccctatatccgagccgaagtggaggacaacattatggttacctttaggaatcaagcctctcgcccctacagcttctactcctccctcatcagttatgaggaggatcagagacaaggcgctgaaccacggaagaactttgtgaaaccgaatgagacgaagacctacttctggaaagtacagcaccacatggcccccacaaaagacgaattcgattgcaaagcatgggcgtatttttcagacgttgacttggagaaagatgtacattcaggacttattggtcctttgttggtgtgtcacactaacactctcaatccagcccatggcaggcaggtgacagtccaggaattcgctcttttctttaccatctttgatgagaccaagtcctggtacttcacggaaaacatggagcgcaattgcagagccccctgtaacatacagatggaggaccctacctttaaggaaaattatcggttccacgcaatcaacggatacattatggatacactccctggccttgtgatggctcaggaccaacgaatcaggtggtacctcctcagcatgggttctaatgagaacatacactccattcacttttcaggacatgtgttcactgtccggaagaaagaagagtataagatggccctctacaatttgtatccaggcgtgtttgagaccgttgaaatgcttccctctaaagctggcatctggagagtagagtgcttgatcggagaacatcttcacgcaggtatgagcaccttgttcctcgtgtacagcaacaaatgtcagaccccacttggcatggccagtggacacattcgcgactttcagatcacagcatctggccagtatggacaatgggccccaaagttggctcgcctccattactccggtagcataaatgcgtggtccactaaagaacctttcagctggattaaggtcgatcttcttgcccccatgatcatccacggcattaagacacagggagcgaggcagaaattctcctccctctacatctcacagttcattattatgtatagtttggacggcaagaagtggcaaacttatagaggtaacagtactggaacactcatggtgttcttcggcaacgttgatagctctggcatcaaacacaacatctttaatcctcccataatagctcggtacatcagattgcatccgacccactacagcattaggagtacactccgaatggagcttatgggttgcgacttgaattcctgttcaatgccactcggaatggagtctaaagccatctctgatgcacagataaccgccagtagctactttacgaacatgtttgctacgtggtcaccctctaaggcaaggcttcatttgcaaggccggtctaatgcctggagacctcaggtgaacaacccgaaagaatggctccaggtggactttcagaagaccatgaaagtaacaggtgtcactactcagggagttaagtccttgctcaccagcatgtatgtgaaggagttccttatttcctcatcacaagatggccaccagtggaccctcttctttcagaatggtaaggtcaaagtgtttcagggcaatcaagacagcttcacacccgtggtgaacagtcttgatcctccactcttgacacgataccttcgaatccatccacagtcttgggttcaccagattgcattgcgcatggaagtacttggatgcgaggctcaggacctctac

SEQ ID NO: 2570 - protein, 1457 aa, synthetic construct
  REGION 1..1457: note = Variant of human B-domain deleted Factor VIII
MQIELSTCFFLCLLRFCFSATRRYYLGAVELSWDYMQSDLGELPVDARFPPRVPKSFPFNTSVVYKKTLFVEFTDHLFNIAKPRPPWMGLLGPTIQAEVYDTVVITLKNMASHPVSLHAVGVSYWKASEGAEYDDQTSQREKEDDKVFPGGSHTYVWQVLKENGPMASDPLCLTYSYLSHVDLVKDLNSGLIGALLVCREGSLAKEKTQTLHKFILLFAVFDEGKSWHSETKNSLMQDRDAASARAWPKMHTVNGYVNRSLPGLIGCHRKSVYWHVIGMGTTPEVHSIFLEGHTFLVRNHRQASLEISPITFLTAQTLLMDLGQFLLFCHISSHQHDGMEAYVKVDSCPEEPQLRMKNNEEAEDYDDDLTDSEMDVVRFDDDNSPSFIQIRSVAKKHPKTWVHYIAAEEEDWDYAPLVLAPDDRSYKSQYLNNGPQRIGRKYKKVRFMAYTDETFKTREAIQHESGILGPLLYGEVGDTLLIIFKNQASRPYNIYPHGITDVRPLYSRRLPKGVKHLKDFPILPGEIFKYKWTVTVEDGPTKSDPRCLTRYYSSFVNMERDLASGLIGPLLICYKESVDQRGNQIMSDKRNVILFSVFDENRSWYLTENIQRFLPNPAGVQLEDPEFQASNIMHSINGYVFDSLQLSVCLHEVAYWYILSIGAQTDFLSVFFSGYTFKHKMVYEDTLTLFPFSGETVFMSMENPGLWILGCHNSDFRNRGMTALLKVSSCDKNTGDYYEDSYEDISAYLSSKNNAIEPRSFSQNPPVLKRHQREITRTTLQSDQEEIDYDDTISVEMKKEDFDIYDEDENQSPRSFQKKTRHYFIAAVERLWDYGMSSSPHVLRNRAQSGSVPQFKKVVFQEFTDGSFTQPLYRGELNEHLGLLGPYIRAEVEDNIMVTFRNQASRPYSFYSSLISYEEDQRQGAEPRKNFVKPNETKTYFWKVQHHMAPTKDEFDCKAWAYFSDVDLEKDVHSGLIGPLLVCHTNTLNPAHGRQVTVQEFALFFTIFDETKSWYFTENMERNCRAPCNIQMEDPTFKENYRFHAINGYIMDTLPGLVMAQDQRIRWYLLSMGSNENIHSIHFSGHVFTVRKKEEYKMALYNLYPGVFETVEMLPSKAGIWRVECLIGEHLHAGMSTLFLVYSNKCQTPLGMASGHIRDFQITASGQYGQWAPKLARLHYSGSINAWSTKEPFSWIKVDLLAPMIIHGIKTQGARQKFSSLYISQFIIMYSLDGKKWQTYRGNSTGTLMVFFGNVDSSGIKHNIFNPPIIARYIRLHPTHYSIRSTLRMELMGCDLNSCSMPLGMESKAISDAQITASSYFTNMFATWSPSKARLHLQGRSNAWRPQVNNPKEWLQVDFQKTMKVTGVTTQGVKSLLTSMYVKEFLISSSQDGHQWTLFFQNGKVKVFQGNQDSFTPVVNSLDPPLLTRYLRIHPQSWVHQIALRMEVLGCEAQDLY

SEQ ID NO: 2571 - DNA, 4371 bp, synthetic construct
  misc_feature 1..4371: note = Variant of human B-domain deleted Factor VIII
  source 1..4371: mol_type = other DNA
atgcagattgaactgtctacctgcttcttcctctgtttgctgaggttctgctttagcgccactagacggtactaccttggcgctgtggagctgtcctgggactatatgcagagtgatttgggagagcttcccgtcgacgcacgatttcctcctcgcgttccaaagtcatttcccttcaacacaagcgtggtgtacaagaagacgctcttcgtcgaattcaccgatcacctgttcaatatcgccaaacccagaccaccatggatgggtcttttggggcctaccatacaagcggaggtgtatgacacagttgttatcactctcaagaacatggcttctcatccggtaagtcttcacgcagtgggcgtgtcctactggaaagcttcagaaggagccgagtatgatgatcagacatcccagagggagaaagaagacgacaaggtatttccaggtgggtctcatacctatgtgtggcaagtgctcaaagagaatggccctatggcaagcgatccgctctgtttgacttacagctacctttcacacgttgacctcgtcaaggacctcaactccgggttgattggagccttgttggtatgcagggaaggatctcttgccaaagagaagacacagaccctccacaagtttatccttctctttgctgtgttcgatgagggcaaaagttggcatagcgaaacgaagaattccctcatgcaggatcgcgacgcagccagcgccagagcttggcccaagatgcacactgtgaacggatatgtcaataggtcacttcctggcttgattgggtgtcatcggaaaagtgtctactggcacgtgatcggaatggggacaacaccagaggtccactccatatttctcgaaggccataccttccttgttcgaaaccacagacaggcatccttggagatctctcccattacctttctcactgcccaaacgctccttatggacttgggtcagttccttctcttctgccatatcagctcacaccagcatgatggtatggaagcttatgtgaaagtcgacagttgtcctgaggagccacagttgcgcatgaagaataatgaagaagccgaggattacgacgacgatctcaccgattctgagatggacgtggtgaggtttgatgacgacaactctccctccttcattcaaatccggagcgtggcgaagaaacaccccaagacttgggtccactatatagcggcggaagaggaggattgggattacgctcctcttgtattggcaccagatgaccgctcatacaaaagccagtacctcaacaacggaccgcagagaattggccggaagtataagaaagtgcgatttatggcctatacagacgaaacctttaagacaagggaggccatccagcatgagagtgggattttgggacctcttctttacggcgaagttggtgataccctcctcatcatcttcaagaatcaagcttctcgcccctataacatttacccacacgggatcactgacgttaggcctttgtatagcagaagacttcccaaaggcgtgaagcatctcaaagacttccccattttgccaggcgagatctttaagtacaaatggaccgtcacagtggaagatggaccgactaaatcagaccctcgatgccttacgcggtactattcctccttcgtgaatatggagagagatttggcaagcggactcataggaccactcctcatctgttacaaggaatctgtagaccagaggggtaaccagattatgagtgataaacgcaatgtgatcctttttagcgtcttcgacgagaaccggtcctggtacttgaccgagaatatacaaaggttccttcccaaccccgcaggcgttcagttggaagaccctgagtttcaggccagcaatattatgcactcaatcaacggctatgtgtttgatagtctccagctttctgtttgcctccatgaagtagcctattggtacatcttgtcaattggtgctcaaacagacttcctctccgtcttcttctccggctacacctttaagcacaagatggtgtatgaggacactctcacactctttccattttctggagaaaccgtgttcatgagcatggagaatccaggcctttggatcttgggttgccacaacagtgattttcgcaatcggggaatgactgctctcctcaaagtcagcagctgtgatttgaacacaggcgactattacgaagattcttacgaggacataagtgcctacttgttgtccaagaataacgccattgagcccagatcattctcccagaatcctcccgtgcttaaaaggcatcagcgcgaaatcaccagaactactcttcagtctgatcaagaggagattgactatgacgacaccataagcgtggaaatgaagaaggaggatttcgatatctatgacgaagatgagaaccagtctccgcggagctttcagaagaagacgcgacactacttcattgcagcagtcgaaaggctttgggactacggtatgtcatcatcccctcatgtgttgcgcaatagagctcagagtggaagtgttccacagttcaagaaagtcgtctttcaagagtttacagatggcagcttcacacagcctctctatcggggcgagcttaacgaacatttgggactccttggtccctatatccgagccgaagtggaggacaacattatggttacctttaggaatcaagcctctcgcccctacagcttctactcctccctcatcagttatgaggaggatcagagacaaggcgctgaaccacggaagaactttgtgaaaccgaatgagacgaagacctacttctggaaagtacagcaccacatggcccccacaaaagacgaattcgattgcaaagcatgggcgtatttttcagacgttgacttggagaaagatgtacattcaggacttattggtcctttgttggtgtgtcacactaacactctcaatccagcccatggcaggcaggtgacagtccaggaattcgctcttttctttaccatctttgatgagaccaagtcctggtacttcacggaaaacatggagcgcaattgcagagccccctgtaacatacagatggaggaccctacctttaaggaaaattatcggttccacgcaatcaacggatacattatggatacactccctggccttgtgatggctcaggaccaacgaatcaggtggtacctcctcagcatgggttctaatgagaacatacactccattcacttttcaggacatgtgttcactgtccggaagaaagaagagtataagatggccctctacaatttgtatccaggcgtgtttgagaccgttgaaatgcttccctctaaagctggcatctggagagtagagtgcttgatcggagaacatcttcacgcaggtatgagcaccttgttcctcgtgtacagcaacaaatgtcagaccccacttggcatggccagtggacacattcgcgactttcagatcacagcatctggccagtatggacaatgggccccaaagttggctcgcctccattactccggtagcataaatgcgtggtccactaaagaacctttcagctggattaaggtcgatcttcttgcccccatgatcatccacggcattaagacacagggagcgaggcagaaattctcctccctctacatctcacagttcattattatgtatagtttggacggcaagaagtggcaaacttatagaggtaacagtactggaacactcatggtgttcttcggcaacgttgatagctctggcatcaaacacaacatctttaatcctcccataatagctcggtacatcagattgcatccgacccactacagcattaggagtacactccgaatggagcttatgggttgcgacttgaattcctgttcaatgccactcggaatggagtctaaagccatctctgatgcacagataaccgccagtagctactttacgaacatgtttgctacgtggtcaccctctaaggcaaggcttcatttgcaaggccggtctaatgcctggagacctcaggtgaacaacccgaaagaatggctccaggtggactttcagaagaccatgaaagtaacaggtgtcactactcagggagttaagtccttgctcaccagcatgtatgtgaaggagttccttatttcctcatcacaagatggccaccagtggaccctcttctttcagaatggtaaggtcaaagtgtttcagggcaatcaagacagcttcacacccgtggtgaacagtcttgatcctccactcttgacacgataccttcgaatccatccacagtcttgggttcaccagattgcattgcgcatggaagtacttggatgcgaggctcaggacctctac

SEQ ID NO: 2572 - protein, 1457 aa, synthetic construct
  REGION 1..1457: note = Variant of human B-domain deleted Factor VIII
MQIELSTCFFLCLLRFCFSATRRYYLGAVELSWDYMQSDLGELPVDARFPPRVPKSFPFNTSVVYKKTLFVEFTDHLFNIAKPRPPWMGLLGPTIQAEVYDTVVITLKNMASHPVSLHAVGVSYWKASEGAEYDDQTSQREKEDDKVFPGGSHTYVWQVLKENGPMASDPLCLTYSYLSHVDLVKDLNSGLIGALLVCREGSLAKEKTQTLHKFILLFAVFDEGKSWHSETKNSLMQDRDAASARAWPKMHTVNGYVNRSLPGLIGCHRKSVYWHVIGMGTTPEVHSIFLEGHTFLVRNHRQASLEISPITFLTAQTLLMDLGQFLLFCHISSHQHDGMEAYVKVDSCPEEPQLRMKNNEEAEDYDDDLTDSEMDVVRFDDDNSPSFIQIRSVAKKHPKTWVHYIAAEEEDWDYAPLVLAPDDRSYKSQYLNNGPQRIGRKYKKVRFMAYTDETFKTREAIQHESGILGPLLYGEVGDTLLIIFKNQASRPYNIYPHGITDVRPLYSRRLPKGVKHLKDFPILPGEIFKYKWTVTVEDGPTKSDPRCLTRYYSSFVNMERDLASGLIGPLLICYKESVDQRGNQIMSDKRNVILFSVFDENRSWYLTENIQRFLPNPAGVQLEDPEFQASNIMHSINGYVFDSLQLSVCLHEVAYWYILSIGAQTDFLSVFFSGYTFKHKMVYEDTLTLFPFSGETVFMSMENPGLWILGCHNSDFRNRGMTALLKVSSCDLNTGDYYEDSYEDISAYLLSKNNAIEPRSFSQNPPVLKRHQREITRTTLQSDQEEIDYDDTISVEMKKEDFDIYDEDENQSPRSFQKKTRHYFIAAVERLWDYGMSSSPHVLRNRAQSGSVPQFKKVVFQEFTDGSFTQPLYRGELNEHLGLLGPYIRAEVEDNIMVTFRNQASRPYSFYSSLISYEEDQRQGAEPRKNFVKPNETKTYFWKVQHHMAPTKDEFDCKAWAYFSDVDLEKDVHSGLIGPLLVCHTNTLNPAHGRQVTVQEFALFFTIFDETKSWYFTENMERNCRAPCNIQMEDPTFKENYRFHAINGYIMDTLPGLVMAQDQRIRWYLLSMGSNENIHSIHFSGHVFTVRKKEEYKMALYNLYPGVFETVEMLPSKAGIWRVECLIGEHLHAGMSTLFLVYSNKCQTPLGMASGHIRDFQITASGQYGQWAPKLARLHYSGSINAWSTKEPFSWIKVDLLAPMIIHGIKTQGARQKFSSLYISQFIIMYSLDGKKWQTYRGNSTGTLMVFFGNVDSSGIKHNIFNPPIIARYIRLHPTHYSIRSTLRMELMGCDLNSCSMPLGMESKAISDAQITASSYFTNMFATWSPSKARLHLQGRSNAWRPQVNNPKEWLQVDFQKTMKVTGVTTQGVKSLLTSMYVKEFLISSSQDGHQWTLFFQNGKVKVFQGNQDSFTPVVNSLDPPLLTRYLRIHPQSWVHQIALRMEVLGCEAQDLY

SEQ ID NO: 2573 - DNA, 4371 bp, synthetic construct
  misc_feature 1..4371: note = Variant of human B-domain deleted Factor VIII
  source 1..4371: mol_type = other DNA
atgcagattgaactgtctacctgcttcttcctctgtttgctgaggttctgctttagcgccactagacggtactaccttggcgctgtggagctgtcctgggactatatgcagagtgatttgggagagcttcccgtcgacgcacgatttcctcctcgcgttccaaagtcatttcccttcaacacaagcgtggtgtacaagaagacgctcttcgtcgaattcaccgatcacctgttcaatatcgccaaacccagaccaccatggatgggtcttttggggcctaccatacaagcggaggtgtatgacacagttgttatcactctcaagaacatggcttctcatccggtaagtcttcacgcagtgggcgtgtcctactggaaagcttcagaaggagccgagtatgatgatcagacatcccagagggagaaagaagacgacaaggtatttccaggtgggtctcatacctatgtgtggcaagtgctcaaagagaatggccctatggcaagcgatccgctctgtttgacttacagctacctttcacacgttgacctcgtcaaggacctcaactccgggttgattggagccttgttggtatgcagggaaggatctcttgccaaagagaagacacagaccctccacaagtttatccttctctttgctgtgttcgatgagggcaaaagttggcatagcgaaacgaagaattccctcatgcaggatcgcgacgcagccagcgccagagcttggcccaagatgcacactgtgaacggatatgtcaataggtcacttcctggcttgattgggtgtcatcggaaaagtgtctactggcacgtgatcggaatggggacaacaccagaggtccactccatatttctcgaaggccataccttccttgttcgaaaccacagacaggcatccttggagatctctcccattacctttctcactgcccaaacgctccttatggacttgggtcagttccttctcttctgccatatcagctcacaccagcatgatggtatggaagcttatgtgaaagtcgacagttgtcctgaggagccacagttgcgcatgaagaataatgaagaagccgaggattacgacgacgatctcaccgattctgagatggacgtggtgaggtttgatgacgacaactctccctccttcattcaaatccggagcgtggcgaagaaacaccccaagacttgggtccactatatagcggcggaagaggaggattgggattacgctcctcttgtattggcaccagatgaccgctcatacaaaagccagtacctcaacaacggaccgcagagaattggccggaagtataagaaagtgcgatttatggcctatacagacgaaacctttaagacaagggaggccatccagcatgagagtgggattttgggacctcttctttacggcgaagttggtgataccctcctcatcatcttcaagaatcaagcttctcgcccctataacatttacccacacgggatcactgacgttaggcctttgtatagcagaagacttcccaaaggcgtgaagcatctcaaagacttccccattttgccaggcgagatctttaagtacaaatggaccgtcacagtggaagatggaccgactaaatcagaccctcgatgccttacgcggtactattcctccttcgtgaatatggagagagatttggcaagcggactcataggaccactcctcatctgttacaaggaatctgtagaccagaggggtaaccagattatgagtgataaacgcaatgtgatcctttttagcgtcttcgacgagaaccggtcctggtacttgaccgagaatatacaaaggttccttcccaaccccgcaggcgttcagttggaagaccctgagtttcaggccagcaatattatgcactcaatcaacggctatgtgtttgatagtctccagctttctgtttgcctccatgaagtagcctattggtacatcttgtcaattggtgctcaaacagacttcctctccgtcttcttctccggctacacctttaagcacaagatggtgtatgaggacactctcacactctttccattttctggagaaaccgtgttcatgagcatggagaatccaggcctttggatcttgggttgccacaacagtgattttcgcaatcggggaatgactgctctcctcaaagtcagcagctgtgataagaacacaggcgactattacgaagattcttacgaggacataagtgcctacttgttgtcctttaataacgccattgagcccagatcattctcccagaatcctcccgtgcttaaaaggcatcagcgcgaaatcaccagaactactcttcagtctgatcaagaggagattgactatgacgacaccataagcgtggaaatgaagaaggaggatttcgatatctatgacgaagatgagaaccagtctccgcggagctttcagaagaagacgcgacactacttcattgcagcagtcgaaaggctttgggactacggtatgtcatcatcccctcatgtgttgcgcaatagagctcagagtggaagtgttccacagttcaagaaagtcgtctttcaagagtttacagatggcagcttcacacagcctctctatcggggcgagcttaacgaacatttgggactccttggtccctatatccgagccgaagtggaggacaacattatggttacctttaggaatcaagcctctcgcccctacagcttctactcctccctcatcagttatgaggaggatcagagacaaggcgctgaaccacggaagaactttgtgaaaccgaatgagacgaagacctacttctggaaagtacagcaccacatggcccccacaaaagacgaattcgattgcaaagcatgggcgtatttttcagacgttgacttggagaaagatgtacattcaggacttattggtcctttgttggtgtgtcacactaacactctcaatccagcccatggcaggcaggtgacagtccaggaattcgctcttttctttaccatctttgatgagaccaagtcctggtacttcacggaaaacatggagcgcaattgcagagccccctgtaacatacagatggaggaccctacctttaaggaaaattatcggttccacgcaatcaacggatacattatggatacactccctggccttgtgatggctcaggaccaacgaatcaggtggtacctcctcagcatgggttctaatgagaacatacactccattcacttttcaggacatgtgttcactgtccggaagaaagaagagtataagatggccctctacaatttgtatccaggcgtgtttgagaccgttgaaatgcttccctctaaagctggcatctggagagtagagtgcttgatcggagaacatcttcacgcaggtatgagcaccttgttcctcgtgtacagcaacaaatgtcagaccccacttggcatggccagtggacacattcgcgactttcagatcacagcatctggccagtatggacaatgggccccaaagttggctcgcctccattactccggtagcataaatgcgtggtccactaaagaacctttcagctggattaaggtcgatcttcttgcccccatgatcatccacggcattaagacacagggagcgaggcagaaattctcctccctctacatctcacagttcattattatgtatagtttggacggcaagaagtggcaaacttatagaggtaacagtactggaacactcatggtgttcttcggcaacgttgatagctctggcatcaaacacaacatctttaatcctcccataatagctcggtacatcagattgcatccgacccactacagcattaggagtacactccgaatggagcttatgggttgcgacttgaattcctgttcaatgccactcggaatggagtctaaagccatctctgatgcacagataaccgccagtagctactttacgaacatgtttgctacgtggtcaccctctaaggcaaggcttcatttgcaaggccggtctaatgcctggagacctcaggtgaacaacccgaaagaatggctccaggtggactttcagaagaccatgaaagtaacaggtgtcactactcagggagttaagtccttgctcaccagcatgtatgtgaaggagttccttatttcctcatcacaagatggccaccagtggaccctcttctttcagaatggtaaggtcaaagtgtttcagggcaatcaagacagcttcacacccgtggtgaacagtcttgatcctccactcttgacacgataccttcgaatccatccacagtcttgggttcaccagattgcattgcgcatggaagtacttggatgcgaggctcaggacctctac

SEQ ID NO: 2574 - protein, 1457 aa, synthetic construct
  REGION 1..1457: note = Variant of human B-domain deleted Factor VIII
MQIELSTCFFLCLLRFCFSATRRYYLGAVELSWDYMQSDLGELPVDARFPPRVPKSFPFNTSVVYKKTLFVEFTDHLFNIAKPRPPWMGLLGPTIQAEVYDTVVITLKNMASHPVSLHAVGVSYWKASEGAEYDDQTSQREKEDDKVFPGGSHTYVWQVLKENGPMASDPLCLTYSYLSHVDLVKDLNSGLIGALLVCREGSLAKEKTQTLHKFILLFAVFDEGKSWHSETKNSLMQDRDAASARAWPKMHTVNGYVNRSLPGLIGCHRKSVYWHVIGMGTTPEVHSIFLEGHTFLVRNHRQASLEISPITFLTAQTLLMDLGQFLLFCHISSHQHDGMEAYVKVDSCPEEPQLRMKNNEEAEDYDDDLTDSEMDVVRFDDDNSPSFIQIRSVAKKHPKTWVHYIAAEEEDWDYAPLVLAPDDRSYKSQYLNNGPQRIGRKYKKVRFMAYTDETFKTREAIQHESGILGPLLYGEVGDTLLIIFKNQASRPYNIYPHGITDVRPLYSRRLPKGVKHLKDFPILPGEIFKYKWTVTVEDGPTKSDPRCLTRYYSSFVNMERDLASGLIGPLLICYKESVDQRGNQIMSDKRNVILFSVFDENRSWYLTENIQRFLPNPAGVQLEDPEFQASNIMHSINGYVFDSLQLSVCLHEVAYWYILSIGAQTDFLSVFFSGYTFKHKMVYEDTLTLFPFSGETVFMSMENPGLWILGCHNSDFRNRGMTALLKVSSCDKNTGDYYEDSYEDISAYLLSFNNAIEPRSFSQNPPVLKRHQREITRTTLQSDQEEIDYDDTISVEMKKEDFDIYDEDENQSPRSFQKKTRHYFIAAVERLWDYGMSSSPHVLRNRAQSGSVPQFKKVVFQEFTDGSFTQPLYRGELNEHLGLLGPYIRAEVEDNIMVTFRNQASRPYSFYSSLISYEEDQRQGAEPRKNFVKPNETKTYFWKVQHHMAPTKDEFDCKAWAYFSDVDLEKDVHSGLIGPLLVCHTNTLNPAHGRQVTVQEFALFFTIFDETKSWYFTENMERNCRAPCNIQMEDPTFKENYRFHAINGYIMDTLPGLVMAQDQRIRWYLLSMGSNENIHSIHFSGHVFTVRKKEEYKMALYNLYPGVFETVEMLPSKAGIWRVECLIGEHLHAGMSTLFLVYSNKCQTPLGMASGHIRDFQITASGQYGQWAPKLARLHYSGSINAWSTKEPFSWIKVDLLAPMIIHGIKTQGARQKFSSLYISQFIIMYSLDGKKWQTYRGNSTGTLMVFFGNVDSSGIKHNIFNPPIIARYIRLHPTHYSIRSTLRMELMGCDLNSCSMPLGMESKAISDAQITASSYFTNMFATWSPSKARLHLQGRSNAWRPQVNNPKEWLQVDFQKTMKVTGVTTQGVKSLLTSMYVKEFLISSSQDGHQWTLFFQNGKVKVFQGNQDSFTPVVNSLDPPLLTRYLRIHPQSWVHQIALRMEVLGCEAQDLY

SEQ ID NO: 2575 - DNA, 4371 bp, synthetic construct
  misc_feature 1..4371: note = Variant of human B-domain deleted Factor VIII
  source 1..4371: mol_type = other DNA
atgcagattgaactgtctacctgcttcttcctctgtttgctgaggttctgctttagcgccactagacggtactaccttggcgctgtggagctgtcctgggactatatgcagagtgatttgggagagcttcccgtcgacgcacgatttcctcctcgcgttccaaagtcatttcccttcaacacaagcgtggtgtacaagaagacgctcttcgtcgaattcaccgatcacctgttcaatatcgccaaacccagaccaccatggatgggtcttttggggcctaccatacaagcggaggtgtatgacacagttgttatcactctcaagaacatggcttctcatccggtaagtcttcacgcagtgggcgtgtcctactggaaagcttcagaaggagccgagtatgatgatcagacatcccagagggagaaagaagacgacaaggtatttccaggtgggtctcatacctatgtgtggcaagtgctcaaagagaatggccctatggcaagcgatccgctctgtttgacttacagctacctttcacacgttgacctcgtcaaggacctcaactccgggttgattggagccttgttggtatgcagggaaggatctcttgccaaagagaagacacagaccctccacaagtttatccttctctttgctgtgttcgatgagggcaaaagttggcatagcgaaacgaagaattccctcatgcaggatcgcgacgcagccagcgccagagcttggcccaagatgcacactgtgaacggatatgtcaataggtcacttcctggcttgattgggtgtcatcggaaaagtgtctactggcacgtgatcggaatggggacaacaccagaggtccactccatatttctcgaaggccataccttccttgttcgaaaccacagacaggcatccttggagatctctcccattacctttctcactgcccaaacgctccttatggacttgggtcagttccttctcttctgccatatcagctcacaccagcatgatggtatggaagcttatgtgaaagtcgacagttgtcctgaggagccacagttgcgcatgaagaataatgaagaagccgaggattacgacgacgatctcaccgattctgagatggacgtggtgaggtttgatgacgacaactctccctccttcattcaaatccggagcgtggcgaagaaacaccccaagacttgggtccactatatagcggcggaagaggaggattgggattacgctcctcttgtattggcaccagatgaccgctcatacaaaagccagtacctcaacaacggaccgcagagaattggccggaagtataagaaagtgcgatttatggcctatacagacgaaacctttaagacaagggaggccatccagcatgagagtgggattttgggacctcttctttacggcgaagttggtgataccctcctcatcatcttcaagaatcaagcttctcgcccctataacatttacccacacgggatcactgacgttaggcctttgtatagcagaagacttcccaaaggcgtgaagcatctcaaagacttccccattttgccaggcgagatctttaagtacaaatggaccgtcacagtggaagatggaccgactaaatcagaccctcgatgccttacgcggtactattcctccttcgtgaatatggagagagatttggcaagcggactcataggaccactcctcatctgttacaaggaatctgtagaccagaggggtaaccagattatgagtgataaacgcaatgtgatcctttttagcgtcttcgacgagaaccggtcctggtacttgaccgagaatatacaaaggttccttcccaaccccgcaggcgttcagttggaagaccctgagtttcaggccagcaatattatgcactcaatcaacggctatgtgtttgatagtctccagctttctgtttgcctccatgaagtagcctattggtacatcttgtcaattggtgctcaaacagacttcctctccgtcttcttctccggctacacctttaagcacaagatggtgtatgaggacactctcacactctttccattttctggagaaaccgtgttcatgagcatggagaatccaggcctttggatcttgggttgccacaacagtgattttcgcaatcggggaatgactgctctcctcaaagtcagcagctgtgataagaacacaggcgactattacgaagattcttacgaggacataagtgcctacttgttgtccaagaataacgccattgagcccagatcattctcccagaatcctcccgtgcttaaaaggcatcagcgcgaaatcaccagaactactcttcagtctgatcaagaggagattgactatgacgacaccataagcgtggaaatgaagaaggaggatttcgatatctatgacgaagatgagaaccagtctccgcggagctttcagaagaagacgcgacactacttcattgcagcagtcgaaaggctttgggactacggtatgtcatcatcccctcatgtgttgcgcaatagagctcagagtggaagtgttccacagttcaagaaagtcgtctttcaagagtttacagatggcagcttcacacagcctctctatcggggcgagcttaacgaacatttgggactccttggtccctatatccgagccgaagtggaggacaacattatggttacctttaggaatcaagcctctcgcccctacagcttctactcctccctcatcagttatgaggaggatcagagacaaggcgctgaaccacggaagaactttgtgaaaccgaatgagacgaagacctacttctggaaagtacagcaccacatggcccccacaaaagacgaattcgattgcaaagcatgggcgtatttttcagacgttgacttggagaaagatgtacattcaggacttattggtcctttgttggtgtgtcacactaacactctcaatccagcccatggcaggcaggtgacagtccaggaattcgctcttttctttaccatctttgatgagaccaagtcctggtacttcacggaaaacatggagcgcaattgcagagccccctgtaacatacagatggaggaccctacctttaaggaaaattatcggttccacgcaatcaacggatacattatggatacactccctggccttgtgatggctcaggaccaacgaatcaggtggtacctcctcagcatgggttctaatgagaacatacactccattcacttttcaggacatgtgttcactgtccggaagagtgaagagtataagatggccctctacaatttgtatccaggcgtgtttgagaccgttgaaatgcttccctctaaagctggcatctggagagtagagtgcttgatcggagaacatcttcacgcaggtatgagcaccttgttcctcgtgtacagcaacaaatgtcagaccccacttggcatggccagtggacacattcgcgactttcagatcacagcatctggccagtatggacaatgggccccaaagttggctcgcctccattactccggtagcataaatgcgtggtccactaaagaacctttcagctggattaaggtcgatcttcttgcccccatgatcatccacggcattaagacacagggagcgaggcagaaattctcctccctctacatctcacagttcattattatgtatagtttggacggcaagaagtggcaaacttatagaggtaacagtactggaacactcatggtgttcttcggcaacgttgatagctctggcatcaaacacaacatctttaatcctcccataatagctcggtacatcagattgcatccgacccactacagcattaggagtacactccgaatggagcttatgggttgcgacttgaattcctgttcaatgccactcggaatggagtctaaagccatctctgatgcacagataaccgccagtagctactttacgaacatgtttgctacgtggtcaccctctaaggcaaggcttcatttgcaaggccggtctaatgcctggagacctcaggtgaacaacccgaaagaatggctccaggtggactttcagaagaccatgaaagtaacaggtgtcactactcagggagttaagtccttgctcaccagcatgtatgtgaaggagttccttatttcctcatcacaagatggccaccagtggaccctcttctttcagaatggtaaggtcaaagtgtttcagggcaatcaagacagcttcacacccgtggtgaacagtcttgatcctccactcttgacacgataccttcgaatccatccacagtcttgggttcaccagattgcattgcgcatggaagtacttggatgcgaggctcaggacctctac

SEQ ID NO: 2576 - protein, 1457 aa, synthetic construct
  REGION 1..1457: note = Variant of human B-domain deleted Factor VIII
MQIELSTCFFLCLLRFCFSATRRYYLGAVELSWDYMQSDLGELPVDARFPPRVPKSFPFNTSVVYKKTLFVEFTDHLFNIAKPRPPWMGLLGPTIQAEVYDTVVITLKNMASHPVSLHAVGVSYWKASEGAEYDDQTSQREKEDDKVFPGGSHTYVWQVLKENGPMASDPLCLTYSYLSHVDLVKDLNSGLIGALLVCREGSLAKEKTQTLHKFILLFAVFDEGKSWHSETKNSLMQDRDAASARAWPKMHTVNGYVNRSLPGLIGCHRKSVYWHVIGMGTTPEVHSIFLEGHTFLVRNHRQASLEISPITFLTAQTLLMDLGQFLLFCHISSHQHDGMEAYVKVDSCPEEPQLRMKNNEEAEDYDDDLTDSEMDVVRFDDDNSPSFIQIRSVAKKHPKTWVHYIAAEEEDWDYAPLVLAPDDRSYKSQYLNNGPQRIGRKYKKVRFMAYTDETFKTREAIQHESGILGPLLYGEVGDTLLIIFKNQASRPYNIYPHGITDVRPLYSRRLPKGVKHLKDFPILPGEIFKYKWTVTVEDGPTKSDPRCLTRYYSSFVNMERDLASGLIGPLLICYKESVDQRGNQIMSDKRNVILFSVFDENRSWYLTENIQRFLPNPAGVQLEDPEFQASNIMHSINGYVFDSLQLSVCLHEVAYWYILSIGAQTDFLSVFFSGYTFKHKMVYEDTLTLFPFSGETVFMSMENPGLWILGCHNSDFRNRGMTALLKVSSCDKNTGDYYEDSYEDISAYLLSKNNAIEPRSFSQNPPVLKRHQREITRTTLQSDQEEIDYDDTISVEMKKEDFDIYDEDENQSPRSFQKKTRHYFIAAVERLWDYGMSSSPHVLRNRAQSGSVPQFKKVVFQEFTDGSFTQPLYRGELNEHLGLLGPYIRAEVEDNIMVTFRNQASRPYSFYSSLISYEEDQRQGAEPRKNFVKPNETKTYFWKVQHHMAPTKDEFDCKAWAYFSDVDLEKDVHSGLIGPLLVCHTNTLNPAHGRQVTVQEFALFFTIFDETKSWYFTENMERNCRAPCNIQMEDPTFKENYRFHAINGYIMDTLPGLVMAQDQRIRWYLLSMGSNENIHSIHFSGHVFTVRKSEEYKMALYNLYPGVFETVEMLPSKAGIWRVECLIGEHLHAGMSTLFLVYSNKCQTPLGMASGHIRDFQITASGQYGQWAPKLARLHYSGSINAWSTKEPFSWIKVDLLAPMIIHGIKTQGARQKFSSLYISQFIIMYSLDGKKWQTYRGNSTGTLMVFFGNVDSSGIKHNIFNPPIIARYIRLHPTHYSIRSTLRMELMGCDLNSCSMPLGMESKAISDAQITASSYFTNMFATWSPSKARLHLQGRSNAWRPQVNNPKEWLQVDFQKTMKVTGVTTQGVKSLLTSMYVKEFLISSSQDGHQWTLFFQNGKVKVFQGNQDSFTPVVNSLDPPLLTRYLRIHPQSWVHQIALRMEVLGCEAQDLY

SEQ ID NO: 2577 - DNA, 4371 bp, synthetic construct
  misc_feature 1..4371: note = Variant of human B-domain deleted Factor VIII
  source 1..4371: mol_type = other DNA
atgcagattgaactgtctacctgcttcttcctctgtttgctgaggttctgctttagcgccactagacggtactaccttggcgctgtggagctgtcctgggactatatgcagagtgatttgggagagcttcccgtcgacgcacgatttcctcctcgcgttccaaagtcatttcccttcaacacaagcgtggtgtacaagaagacgctcttcgtcgaattcaccgatcacctgttcaatatcgccaaacccagaccaccatggatgggtcttttggggcctaccatacaagcggaggtgtatgacacagttgttatcactctcaagaacatggcttctcatccggtaagtcttcacgcagtgggcgtgtcctactggaaagcttcagaaggagccgagtatgatgatcagacatcccagagggagaaagaagacgacaaggtatttccaggtgggtctcatacctatgtgtggcaagtgctcaaagagaatggccctatggcaagcgatccgctctgtttgacttacagctacctttcacacgttgacctcgtcaaggacctcaactccgggttgattggagccttgttggtatgcagggaaggatctcttgccaaagagaagacacagaccctccacaagtttatccttctctttgctgtgttcgatgagggcaaaagttggcatagcgaaacgaagaattccctcatgcaggatcgcgacgcagccagcgccagagcttggcccaagatgcacactgtgaacggatatgtcaataggtcacttcctggcttgattgggtgtcatcggaaaagtgtctactggcacgtgatcggaatggggacaacaccagaggtccactccatatttctcgaaggccataccttccttgttcgaaaccacagacaggcatccttggagatctctcccattacctttctcactgcccaaacgctccttatggacttgggtcagttccttctcttctgccatatcagctcacaccagcatgatggtatggaagcttatgtgaaagtcgacagttgtcctgaggagccacagttgcgcatgaagaataatgaagaagccgaggattacgacgacgatctcaccgattctgagatggacgtggtgaggtttgatgacgacaactctccctccttcattcaaatccggagcgtggcgaagaaacaccccaagacttgggtccactatatagcggcggaagaggaggattgggattacgctcctcttgtattggcaccagatgaccgctcatacaaaagccagtacctcaacaacggaccgcagagaattggccggaagtataagaaagtgcgatttatggcctatacagacgaaacctttaagacaagggaggccatccagcatgagagtgggattttgggacctcttctttacggcgaagttggtgataccctcctcatcatcttcaagaatcaagcttctcgcccctataacatttacccacacgggatcactgacgttaggcctttgtatagcagaagacttcccaaaggcgtgaagcatctcaaagacttccccattttgccaggcgagatctttaagtacaaatggaccgtcacagtggaagatggaccgactaaatcagaccctcgatgccttacgcggtactattcctccttcgtgaatatggagagagatttggcaagcggactcataggaccactcctcatctgttacaaggaatctgtagaccagaggggtaaccagattatgagtgataaacgcaatgtgatcctttttagcgtcttcgacgagaaccggtcctggtacttgaccgagaatatacaaaggttccttcccaaccccgcaggcgttcagttggaagaccctgagtttcaggccagcaatattatgcactcaatcaacggctatgtgtttgatagtctccagctttctgtttgcctccatgaagtagcctattggtacatcttgtcaattggtgctcaaacagacttcctctccgtcttcttctccggctacacctttaagcacaagatggtgtatgaggacactctcacactctttccattttctggagaaaccgtgttcatgagcatggagaatccaggcctttggatcttgggttgccacaacagtgattttcgcaatcggggaatgactgctctcctcaaagtcagcagctgtgataagaacacaggcgactattacgaagattcttacgaggacataagtgcctacttgacgtccaagaataacgccattgagcccagatcattctcccagaatcctcccgtgcttaaaaggcatcagcgcgaaatcaccagaactactcttcagtctgatcaagaggagattgactatgacgacaccataagcgtggaaatgaagaaggaggatttcgatatctatgacgaagatgagaaccagtctccgcggagctttcagaagaagacgcgacactacttcattgcagcagtcgaaaggctttgggactacggtatgtcatcatcccctcatgtgttgcgcaatagagctcagagtggaagtgttccacagttcaagaaagtcgtctttcaagagtttacagatggcagcttcacacagcctctctatcggggcgagcttaacgaacatttgggactccttggtccctatatccgagccgaagtggaggacaacattatggttacctttaggaatcaagcctctcgcccctacagcttctactcctccctcatcagttatgaggaggatcagagacaaggcgctgaaccacggaagaactttgtgaaaccgaatgagacgaagacctacttctggaaagtacagcaccacatggcccccacaaaagacgaattcgattgcaaagcatgggcgtatttttcagacgttgacttggagaaagatgtacattcaggacttattggtcctttgttggtgtgtcacactaacactctcaatccagcccatggcaggcaggtgacagtccaggaattcgctcttttctttaccatctttgatgagaccaagtcctggtacttcacggaaaacatggagcgcaattgcagagccccctgtaacatacagatggaggaccctacctttaaggaaaattatcggttccacgcaatcaacggatacattatggatacactccctggccttgtgatggctcaggaccaacgaatcaggtggtacctcctcagcatgggttctaatgagaacatacactccattcacttttcaggacatgtgttcactgtccggaagaaagaagagtataagatggccctctacaatttgtatccaggcgtgtttgagaccgttgaaatgcttccctctaaagctggcatctggagagtagagtgcttgatcggagaacatcttcacgcaggtatgagcaccttgttcctcgtgtacagcaacaaatgtcagaccccacttggcatggccagtggacacattcgcgactttcagatcacagcatctggccagtatggacaatgggccccaaagttggctcgcctccattactccggtagcataaatgcgtggtccactaaagaacctttcagctggattaaggtcgatcttcttgcccccatgatcatccacggcattaagacacagggagcgaggcagaaattctcctccctctacatctcacagttcattattatgtatagtttggacggcaagaagtggcaaacttatagaggtaacagtactggaacactcatggtgttcttcggcaacgttgatagctctggcatcaaacacaacatctttaatcctcccataatagctcggtacatcagattgcatccgacccactacagcattaggagtacactccgaatggagcttatgggttgcgacttgaattcctgttcaatgccactcggaatggagtctaaagccatctctgatgcacagataaccgccagtagctactttacgaacatgtttgctacgtggtcaccctctaaggcaaggcttcatttgcaaggccggtctaatgcctggagacctcaggtgaacaacccgaaagaatggctccaggtggactttcagaagaccatgaaagtaacaggtgtcactactcagggagttaagtccttgctcaccagcatgtatgtgaaggagttccttatttcctcatcacaagatggccaccagtggaccctcttctttcagaatggtaaggtcaaagtgtttcagggcaatcaagacagcttcacacccgtggtgaacagtcttgatcctccactcttgacacgataccttcgaatccatccacagtcttgggttcaccagattgcattgcgcatggaagtacttggatgcgaggctcaggacctctac

SEQ ID NO: 2578 - protein, 1457 aa, synthetic construct
  REGION 1..1457: note = Variant of human B-domain deleted Factor VIII
MQIELSTCFFLCLLRFCFSATRRYYLGAVELSWDYMQSDLGELPVDARFPPRVPKSFPFNTSVVYKKTLFVEFTDHLFNIAKPRPPWMGLLGPTIQAEVYDTVVITLKNMASHPVSLHAVGVSYWKASEGAEYDDQTSQREKEDDKVFPGGSHTYVWQVLKENGPMASDPLCLTYSYLSHVDLVKDLNSGLIGALLVCREGSLAKEKTQTLHKFILLFAVFDEGKSWHSETKNSLMQDRDAASARAWPKMHTVNGYVNRSLPGLIGCHRKSVYWHVIGMGTTPEVHSIFLEGHTFLVRNHRQASLEISPITFLTAQTLLMDLGQFLLFCHISSHQHDGMEAYVKVDSCPEEPQLRMKNNEEAEDYDDDLTDSEMDVVRFDDDNSPSFIQIRSVAKKHPKTWVHYIAAEEEDWDYAPLVLAPDDRSYKSQYLNNGPQRIGRKYKKVRFMAYTDETFKTREAIQHESGILGPLLYGEVGDTLLIIFKNQASRPYNIYPHGITDVRPLYSRRLPKGVKHLKDFPILPGEIFKYKWTVTVEDGPTKSDPRCLTRYYSSFVNMERDLASGLIGPLLICYKESVDQRGNQIMSDKRNVILFSVFDENRSWYLTENIQRFLPNPAGVQLEDPEFQASNIMHSINGYVFDSLQLSVCLHEVAYWYILSIGAQTDFLSVFFSGYTFKHKMVYEDTLTLFPFSGETVFMSMENPGLWILGCHNSDFRNRGMTALLKVSSCDKNTGDYYEDSYEDISAYLTSKNNAIEPRSFSQNPPVLKRHQREITRTTLQSDQEEIDYDDTISVEMKKEDFDIYDEDENQSPRSFQKKTRHYFIAAVERLWDYGMSSSPHVLRNRAQSGSVPQFKKVVFQEFTDGSFTQPLYRGELNEHLGLLGPYIRAEVEDNIMVTFRNQASRPYSFYSSLISYEEDQRQGAEPRKNFVKPNETKTYFWKVQHHMAPTKDEFDCKAWAYFSDVDLEKDVHSGLIGPLLVCHTNTLNPAHGRQVTVQEFALFFTIFDETKSWYFTENMERNCRAPCNIQMEDPTFKENYRFHAINGYIMDTLPGLVMAQDQRIRWYLLSMGSNENIHSIHFSGHVFTVRKKEEYKMALYNLYPGVFETVEMLPSKAGIWRVECLIGEHLHAGMSTLFLVYSNKCQTPLGMASGHIRDFQITASGQYGQWAPKLARLHYSGSINAWSTKEPFSWIKVDLLAPMIIHGIKTQGARQKFSSLYISQFIIMYSLDGKKWQTYRGNSTGTLMVFFGNVDSSGIKHNIFNPPIIARYIRLHPTHYSIRSTLRMELMGCDLNSCSMPLGMESKAISDAQITASSYFTNMFATWSPSKARLHLQGRSNAWRPQVNNPKEWLQVDFQKTMKVTGVTTQGVKSLLTSMYVKEFLISSSQDGHQWTLFFQNGKVKVFQGNQDSFTPVVNSLDPPLLTRYLRIHPQSWVHQIALRMEVLGCEAQDLY

SEQ ID NO: 2579 - DNA, 4371 bp, synthetic construct
  misc_feature 1..4371: note = Variant of human B-domain deleted Factor VIII
  source 1..4371: mol_type = other DNA
atgcagattgaactgtctacctgcttcttcctctgtttgctgaggttctgctttagcgccactagacggtactaccttggcgctgtggagctgtcctgggactatatgcagagtgatttgggagagcttcccgtcgacgcacgatttcctcctcgcgttccaaagtcatttcccttcaacacaagcgtggtgtacaagaagacgctcttcgtcgaattcaccgatcacctgttcaatatcgccaaacccagaccaccatggatgggtcttttggggcctaccatacaagcggaggtgtatgacacagttgttatcactctcaagaacatggcttctcatccggtaagtcttcacgcagtgggcgtgtcctactggaaagcttcagaaggagccgagtatgatgatcagacatcccagagggagaaagaagacgacaaggtatttccaggtgggtctcatacctatgtgtggcaagtgctcaaagagaatggccctatggcaagcgatccgctctgtttgacttacagctacctttcacacgttgacctcgtcaaggacctcaactccgggttgattggagccttgttggtatgcagggaaggatctcttgccaaagagaagacacagaccctccacaagtttatccttctctttgctgtgttcgatgagggcaaaagttggcatagcgaaacgaagaattccctcatgcaggatcgcgacgcagccagcgccagagcttggcccaagatgcacactgtgaacggatatgtcaataggtcacttcctggcttgattgggtgtcatcggaaaagtgtctactggcacgtgatcggaatggggacaacaccagaggtccactccatatttctcgaaggccataccttccttgttcgaaaccacagacaggcatccttggagatctctcccattacctttctcactgcccaaacgctccttatggacttgggtcagttccttctcttctgccatatcagctcacaccagcatgatggtatggaagcttatgtgaaagtcgacagttgtcctgaggagccacagttgcgcatgaagaataatgaagaagccgaggattacgacgacgatctcaccgattctgagatggacgtggtgaggtttgatgacgacaactctccctccttcattcaaatccggagcgtggcgaagaaacaccccaagacttgggtccactatatagcggcggaagaggaggattgggattacgctcctcttgtattggcaccagatgaccgctcatacaaaagccagtacctcaacaacggaccgcagagaattggccggaagtataagaaagtgcgatttatggcctatacagacgaaacctttaagacaagggaggccatccagcatgagagtgggattttgggacctcttctttacggcgaagttggtgataccctcctcatcatcttcaagaatcaagcttctcgcccctataacatttacccacacgggatcactgacgttaggcctttgtatagcagaagacttcccaaaggcgtgaagcatctcaaagacttccccattttgccaggcgagatctttaagtacaaatggaccgtcacagtggaagatggaccgactaaatcagaccctcgatgccttacgcggtactattcctccttcgtgaatatggagagagatttggcaagcggactcataggaccactcctcatctgttacaaggaatctgtagaccagaggggtaaccagattatgagtgataaacgcaatgtgatcctttttagcgtcttcgacgagaaccggtcctggtacttgaccgagaatatacaaaggttccttcccaaccccgcaggcgttcagttggaagaccctgagtttcaggccagcaatattatgcactcaatcaacggctatgtgtttgatagtctccagctttctgtttgcctccatgaagtagcctattggtacatcttgtcaattggtgctcaaacagacttcctctccgtcttcttctccggctacacctttaagcacaagatggtgtatgaggacactctcacactctttccattttctggagaaaccgtgttcatgagcatggagaatccaggcctttggatcttgggttgccacaacagtgattttcgcaatcggggaatgactgctctcctcaaagtcagcagctgtgataagaacacaggcgactattacgaagattcttacgaggacataagtgcctacttgttgtccaagaataacgccattgagcccagatcattctcccagaatcctcccgtgcttaaaaggcatcagcgcgaaatcaccagaactactcttcagtctgatcaagaggagattgactatgacgacaccataagcgtggaaatgaagaagattgatttcgatatctatgacgaagatgagaaccagtctccgcggagctttcagaagaagacgcgacactacttcattgcagcagtcgaaaggctttgggactacggtatgtcatcatcccctcatgtgttgcgcaatagagctcagagtggaagtgttccacagttcaagaaagtcgtctttcaagagtttacagatggcagcttcacacagcctctctatcggggcgagcttaacgaacatttgggactccttggtccctatatccgagccgaagtggaggacaacattatggttacctttaggaatcaagcctctcgcccctacagcttctactcctccctcatcagttatgaggaggatcagagacaaggcgctgaaccacggaagaactttgtgaaaccgaatgagacgaagacctacttctggaaagtacagcaccacatggcccccacaaaagacgaattcgattgcaaagcatgggcgtatttttcagacgttgacttggagaaagatgtacattcaggacttattggtcctttgttggtgtgtcacactaacactctcaatccagcccatggcaggcaggtgacagtccaggaattcgctcttttctttaccatctttgatgagaccaagtcctggtacttcacggaaaacatggagcgcaattgcagagccccctgtaacatacagatggaggaccctacctttaaggaaaattatcggttccacgcaatcaacggatacattatggatacactccctggccttgtgatggctcaggaccaacgaatcaggtggtacctcctcagcatgggttctaatgagaacatacactccattcacttttcaggacatgtgttcactgtccggaagaaagaagagtataagatggccctctacaatttgtatccaggcgtgtttgagaccgttgaaatgcttccctctaaagctggcatctggagagtagagtgcttgatcggagaacatcttcacgcaggtatgagcaccttgttcctcgtgtacagcaacaaatgtcagaccccacttggcatggccagtggacacattcgcgactttcagatcacagcatctggccagtatggacaatgggccccaaagttggctcgcctccattactccggtagcataaatgcgtggtccactaaagaacctttcagctggattaaggtcgatcttcttgcccccatgatcatccacggcattaagacacagggagcgaggcagaaattctcctccctctacatctcacagttcattattatgtatagtttggacggcaagaagtggcaaacttatagaggtaacagtactggaacactcatggtgttcttcggcaacgttgatagctctggcatcaaacacaacatctttaatcctcccataatagctcggtacatcagattgcatccgacccactacagcattaggagtacactccgaatggagcttatgggttgcgacttgaattcctgttcaatgccactcggaatggagtctaaagccatctctgatgcacagataaccgccagtagctactttacgaacatgtttgctacgtggtcaccctctaaggcaaggcttcatttgcaaggccggtctaatgcctggagacctcaggtgaacaacccgaaagaatggctccaggtggactttcagaagaccatgaaagtaacaggtgtcactactcagggagttaagtccttgctcaccagcatgtatgtgaaggagttccttatttcctcatcacaagatggccaccagtggaccctcttctttcagaatggtaaggtcaaagtgtttcagggcaatcaagacagcttcacacccgtggtgaacagtcttgatcctccactcttgacacgataccttcgaatccatccacagtcttgggttcaccagattgcattgcgcatggaagtacttggatgcgaggctcaggacctctac

SEQ ID NO: 2580 - protein, 1457 aa, synthetic construct
  REGION 1..1457: note = Variant of human B-domain deleted Factor VIII
MQIELSTCFFLCLLRFCFSATRRYYLGAVELSWDYMQSDLGELPVDARFPPRVPKSFPFNTSVVYKKTLFVEFTDHLFNIAKPRPPWMGLLGPTIQAEVYDTVVITLKNMASHPVSLHAVGVSYWKASEGAEYDDQTSQREKEDDKVFPGGSHTYVWQVLKENGPMASDPLCLTYSYLSHVDLVKDLNSGLIGALLVCREGSLAKEKTQTLHKFILLFAVFDEGKSWHSETKNSLMQDRDAASARAWPKMHTVNGYVNRSLPGLIGCHRKSVYWHVIGMGTTPEVHSIFLEGHTFLVRNHRQASLEISPITFLTAQTLLMDLGQFLLFCHISSHQHDGMEAYVKVDSCPEEPQLRMKNNEEAEDYDDDLTDSEMDVVRFDDDNSPSFIQIRSVAKKHPKTWVHYIAAEEEDWDYAPLVLAPDDRSYKSQYLNNGPQRIGRKYKKVRFMAYTDETFKTREAIQHESGILGPLLYGEVGDTLLIIFKNQASRPYNIYPHGITDVRPLYSRRLPKGVKHLKDFPILPGEIFKYKWTVTVEDGPTKSDPRCLTRYYSSFVNMERDLASGLIGPLLICYKESVDQRGNQIMSDKRNVILFSVFDENRSWYLTENIQRFLPNPAGVQLEDPEFQASNIMHSINGYVFDSLQLSVCLHEVAYWYILSIGAQTDFLSVFFSGYTFKHKMVYEDTLTLFPFSGETVFMSMENPGLWILGCHNSDFRNRGMTALLKVSSCDKNTGDYYEDSYEDISAYLLSKNNAIEPRSFSQNPPVLKRHQREITRTTLQSDQEEIDYDDTISVEMKKIDFDIYDEDENQSPRSFQKKTRHYFIAAVERLWDYGMSSSPHVLRNRAQSGSVPQFKKVVFQEFTDGSFTQPLYRGELNEHLGLLGPYIRAEVEDNIMVTFRNQASRPYSFYSSLISYEEDQRQGAEPRKNFVKPNETKTYFWKVQHHMAPTKDEFDCKAWAYFSDVDLEKDVHSGLIGPLLVCHTNTLNPAHGRQVTVQEFALFFTIFDETKSWYFTENMERNCRAPCNIQMEDPTFKENYRFHAINGYIMDTLPGLVMAQDQRIRWYLLSMGSNENIHSIHFSGHVFTVRKKEEYKMALYNLYPGVFETVEMLPSKAGIWRVECLIGEHLHAGMSTLFLVYSNKCQTPLGMASGHIRDFQITASGQYGQWAPKLARLHYSGSINAWSTKEPFSWIKVDLLAPMIIHGIKTQGARQKFSSLYISQFIIMYSLDGKKWQTYRGNSTGTLMVFFGNVDSSGIKHNIFNPPIIARYIRLHPTHYSIRSTLRMELMGCDLNSCSMPLGMESKAISDAQITASSYFTNMFATWSPSKARLHLQGRSNAWRPQVNNPKEWLQVDFQKTMKVTGVTTQGVKSLLTSMYVKEFLISSSQDGHQWTLFFQNGKVKVFQGNQDSFTPVVNSLDPPLLTRYLRIHPQSWVHQIALRMEVLGCEAQDLY

SEQ ID NO: 2581 - DNA, 4371 bp, synthetic construct
  misc_feature 1..4371: note = Variant of human B-domain deleted Factor VIII
  source 1..4371: mol_type = other DNA
atgcagattgaactgtctacctgcttcttcctctgtttgctgaggttctgctttagcgccactagacggtactaccttggcgctgtggagctgtcctgggactatatgcagagtgatttgggagagcttcccgtcgacgcacgatttcctcctcgcgttccaaagtcatttcccttcaacacaagcgtggtgtacaagaagacgctcttcgtcgaattcaccgatcacctgttcaatatcgccaaacccagaccaccatggatgggtcttttggggcctaccatacaagcggaggtgtatgacacagttgttatcactctcaagaacatggcttctcatccggtaagtcttcacgcagtgggcgtgtcctactggaaagcttcagaaggagccgagtatgatgatcagacatcccagagggagaaagaagacgacaaggtatttccaggtgggtctcatacctatgtgtggcaagtgctcaaagagaatggccctatggcaagcgatccgctctgtttgacttacagctacctttcacacgttgacctcgtcaaggacctcaactccgggttgattggagccttgttggtatgcagggaaggatctcttgccaaagagaagacacagaccctccacaagtttatccttctctttgctgtgttcgatgagggcaaaagttggcatagcgaaacgaagaattccctcatgcaggatcgcgacgcagccagcgccagagcttggcccaagatgcacactgtgaacggatatgtcaataggtcacttcctggcttgattgggtgtcatcggaaaagtgtctactggcacgtgatcggaatggggacaacaccagaggtccactccatatttctcgaaggccataccttccttgttcgaaaccacagacaggcatccttggagatctctcccattacctttctcactgcccaaacgctccttatggacttgggtcagttccttctcttctgccatatcagctcacaccagcatgatggtatggaagcttatgtgaaagtcgacagttgtcctgaggagccacagttgcgcatgaagaataatgaagaagccgaggattacgacgacgatctcaccgattctgagatggacgtggtgaggtttgatgacgacaactctccctccttcattcaaatccggagcgtggcgaagaaacaccccaagacttgggtccactatatagcggcggaagaggaggattgggattacgctcctcttgtattggcaccagatgaccgctcatacaaaagccagtacctcaacaacggaccgcagagaattggccggaagtataagaaagtgcgatttatggcctatacagacgaaacctttaagacaagggaggccatccagcatgagagtgggattttgggacctcttctttacggcgaagttggtgataccctcctcatcatcttcaagaatcaagcttctcgcccctataacatttacccacacgggatcactgacgttaggcctttgtatagcagaagacttcccaaaggcgtgaagcatctcaaagacttccccattttgccaggcgagatctttaagtacaaatggaccgtcacagtggaagatggaccgactaaatcagaccctcgatgccttacgcggtactattcctccttcgtgaatatggagagagatttggcaagcggactcataggaccactcctcatctgttacaaggaatctgtagaccagaggggtaaccagattatgagtgataaacgcaatgtgatcctttttagcgtcttcgacgagaaccggtcctggtacttgaccgagaatatacaaaggttccttcccaaccccgcaggcgttcagttggaagaccctgagtttcaggccagcaatattatgcactcaatcaacggctatgtgtttgatagtctccagctttctgtttgcctccatgaagtagcctattggtacatcttgtcaattggtgctcaaacagacttcctctccgtcttcttctccggctacacctttaagcacaagatggtgtatgaggacactctcacactctttccattttctggagaaaccgtgttcatgagcatggagaatccaggcctttggatcttgggttgccacaacagtgattttcgcaatcggggaatgactgctctcctcaaagtcagcagctgtgataagaacacaggcgactattacgaagattcttacgaggacataagtgcctacttgttgtccaagaataacgccattgagcccagatcattctcccagaatcctcccgtgcttaaaaggcatcagcgcgaaatcaccagaactactcttcagtctgatcaagaggagattgactatgacgacaccataagcgtggaaatgaagaaggaggatttcgatatctatgacgaagataggaaccagtctccgcggagctttcagaagaagacgcgacactacttcattgcagcagtcgaaaggctttgggactacggtatgtcatcatcccctcatgtgttgcgcaatagagctcagagtggaagtgttccacagttcaagaaagtcgtctttcaagagtttacagatggcagcttcacacagcctctctatcggggcgagcttaacgaacatttgggactccttggtccctatatccgagccgaagtggaggacaacattatggttacctttaggaatcaagcctctcgcccctacagcttctactcctccctcatcagttatgaggaggatcagagacaaggcgctgaaccacggaagaactttgtgaaaccgaatgagacgaagacctacttctggaaagtacagcaccacatggcccccacaaaagacgaattcgattgcaaagcatgggcgtatttttcagacgttgacttggagaaagatgtacattcaggacttattggtcctttgttggtgtgtcacactaacactctcaatccagcccatggcaggcaggtgacagtccaggaattcgctcttttctttaccatctttgatgagaccaagtcctggtacttcacggaaaacatggagcgcaattgcagagccccctgtaacatacagatggaggaccctacctttaaggaaaattatcggttccacgcaatcaacggatacattatggatacactccctggccttgtgatggctcaggaccaacgaatcaggtggtacctcctcagcatgggttctaatgagaacatacactccattcacttttcaggacatgtgttcactgtccggaagaaagaagagtataagatggccctctacaatttgtatccaggcgtgtttgagaccgttgaaatgcttccctctaaagctggcatctggagagtagagtgcttgatcggagaacatcttcacgcaggtatgagcaccttgttcctcgtgtacagcaacaaatgtcagaccccacttggcatggccagtggacacattcgcgactttcagatcacagcatctggccagtatggacaatgggccccaaagttggctcgcctccattactccggtagcataaatgcgtggtccactaaagaacctttcagctggattaaggtcgatcttcttgcccccatgatcatccacggcattaagacacagggagcgaggcagaaattctcctccctctacatctcacagttcattattatgtatagtttggacggcaagaagtggcaaacttatagaggtaacagtactggaacactcatggtgttcttcggcaacgttgatagctctggcatcaaacacaacatctttaatcctcccataatagctcggtacatcagattgcatccgacccactacagcattaggagtacactccgaatggagcttatgggttgcgacttgaattcctgttcaatgccactcggaatggagtctaaagccatctctgatgcacagataaccgccagtagctactttacgaacatgtttgctacgtggtcaccctctaaggcaaggcttcatttgcaaggccggtctaatgcctggagacctcaggtgaacaacccgaaagaatggctccaggtggactttcagaagaccatgaaagtaacaggtgtcactactcagggagttaagtccttgctcaccagcatgtatgtgaaggagttccttatttcctcatcacaagatggccaccagtggaccctcttctttcagaatggtaaggtcaaagtgtttcagggcaatcaagacagcttcacacccgtggtgaacagtcttgatcctccactcttgacacgataccttcgaatccatccacagtcttgggttcaccagattgcattgcgcatggaagtacttggatgcgaggctcaggacctctac

SEQ ID NO: 2582 - protein, 1457 aa, synthetic construct
  REGION 1..1457: note = Variant of human B-domain deleted Factor VIII
MQIELSTCFFLCLLRFCFSATRRYYLGAVELSWDYMQSDLGELPVDARFPPRVPKSFPFNTSVVYKKTLFVEFTDHLFNIAKPRPPWMGLLGPTIQAEVYDTVVITLKNMASHPVSLHAVGVSYWKASEGAEYDDQTSQREKEDDKVFPGGSHTYVWQVLKENGPMASDPLCLTYSYLSHVDLVKDLNSGLIGALLVCREGSLAKEKTQTLHKFILLFAVFDEGKSWHSETKNSLMQDRDAASARAWPKMHTVNGYVNRSLPGLIGCHRKSVYWHVIGMGTTPEVHSIFLEGHTFLVRNHRQASLEISPITFLTAQTLLMDLGQFLLFCHISSHQHDGMEAYVKVDSCPEEPQLRMKNNEEAEDYDDDLTDSEMDVVRFDDDNSPSFIQIRSVAKKHPKTWVHYIAAEEEDWDYAPLVLAPDDRSYKSQYLNNGPQRIGRKYKKVRFMAYTDETFKTREAIQHESGILGPLLYGEVGDTLLIIFKNQASRPYNIYPHGITDVRPLYSRRLPKGVKHLKDFPILPGEIFKYKWTVTVEDGPTKSDPRCLTRYYSSFVNMERDLASGLIGPLLICYKESVDQRGNQIMSDKRNVILFSVFDENRSWYLTENIQRFLPNPAGVQLEDPEFQASNIMHSINGYVFDSLQLSVCLHEVAYWYILSIGAQTDFLSVFFSGYTFKHKMVYEDTLTLFPFSGETVFMSMENPGLWILGCHNSDFRNRGMTALLKVSSCDKNTGDYYEDSYEDISAYLLSKNNAIEPRSFSQNPPVLKRHQREITRTTLQSDQEEIDYDDTISVEMKKEDFDIYDEDRNQSPRSFQKKTRHYFIAAVERLWDYGMSSSPHVLRNRAQSGSVPQFKKVVFQEFTDGSFTQPLYRGELNEHLGLLGPYIRAEVEDNIMVTFRNQASRPYSFYSSLISYEEDQRQGAEPRKNFVKPNETKTYFWKVQHHMAPTKDEFDCKAWAYFSDVDLEKDVHSGLIGPLLVCHTNTLNPAHGRQVTVQEFALFFTIFDETKSWYFTENMERNCRAPCNIQMEDPTFKENYRFHAINGYIMDTLPGLVMAQDQRIRWYLLSMGSNENIHSIHFSGHVFTVRKKEEYKMALYNLYPGVFETVEMLPSKAGIWRVECLIGEHLHAGMSTLFLVYSNKCQTPLGMASGHIRDFQITASGQYGQWAPKLARLHYSGSINAWSTKEPFSWIKVDLLAPMIIHGIKTQGARQKFSSLYISQFIIMYSLDGKKWQTYRGNSTGTLMVFFGNVDSSGIKHNIFNPPIIARYIRLHPTHYSIRSTLRMELMGCDLNSCSMPLGMESKAISDAQITASSYFTNMFATWSPSKARLHLQGRSNAWRPQVNNPKEWLQVDFQKTMKVTGVTTQGVKSLLTSMYVKEFLISSSQDGHQWTLFFQNGKVKVFQGNQDSFTPVVNSLDPPLLTRYLRIHPQSWVHQIALRMEVLGCEAQDLY

SEQ ID NO: 2583 - DNA, 4371 bp, synthetic construct
  misc_feature 1..4371: note = Variant of human B-domain deleted Factor VIII
  source 1..4371: mol_type = other DNA
atgcagattgaactgtctacctgcttcttcctctgtttgctgaggttctgctttagcgccactagacggtactaccttggcgctgtggagctgtcctgggactatatgcagagtgatttgggagagcttcccgtcgacgcacgatttcctcctcgcgttccaaagtcatttcccttcaacacaagcgtggtgtacaagaagacgctcttcgtcgaattcaccgatcacctgttcaatatcgccaaacccagaccaccatggatgggtcttttggggcctaccatacaagcggaggtgtatgacacagttgttatcactctcaagaacatggcttctcatccggtaagtcttcacgcagtgggcgtgtcctactggaaagcttcagaaggagccgagtatgatgatcagacatcccagagggagaaagaagacgacaaggtatttccaggtgggtctcatacctatgtgtggcaagtgctcaaagagaatggccctatggcaagcgatccgctctgtttgacttacagctacctttcacacgttgacctcgtcaaggacctcaactccgggttgattggagccttgttggtatgcagggaaggatctcttgccaaagagaagacacagaccctccacaagtttatccttctctttgctgtgttcgatgagggcaaaagttggcatagcgaaacgaagaattccctcatgcaggatcgcgacgcagccagcgccagagcttggcccaagatgcacactgtgaacggatatgtcaataggtcacttcctggcttgattgggtgtcatcggaaaagtgtctactggcacgtgatcggaatggggacaacaccagaggtccactccatatttctcgaaggccataccttccttgttcgaaaccacagacaggcatccttggagatctctcccattacctttctcactgcccaaacgctccttatggacttgggtcagttccttctcttctgccatatcagctcacaccagcatgatggtatggaagcttatgtgaaagtcgacagttgtcctgaggagccacagttgcgcatgaagaataatgaagaagccgaggattacgacgacgatctcaccgattctgagatggacgtggtgaggtttgatgacgacaactctccctccttcattcaaatccggagcgtggcgaagaaacaccccaagacttgggtccactatatagcggcggaagaggaggattgggattacgctcctcttgtattggcaccagatgaccgctcatacaaaagccagtacctcaacaacggaccgcagagaattggccggaagtataagaaagtgcgatttatggcctatacagacgaaacctttaagacaagggaggccatccagcatgagagtgggattttgggacctcttctttacggcgaagttggtgataccctcctcatcatcttcaagaatcaagcttctcgcccctataacatttacccacacgggatcactgacgttaggcctttgtatagcagaagacttcccaaaggcgtgaagcatctcaaagacttccccattttgccaggcgagatctttaagtacaaatggaccgtcacagtggaagatggaccgactaaatcagaccctcgatgccttacgcggtactattcctccttcgtgaatatggagagagatttggcaagcggactcataggaccactcctcatctgttacaaggaatctgtagaccagaggggtaaccagattatgagtgataaacgcaatgtgatcctttttagcgtcttcgacgagaaccggtcctggtacttgaccgagaatatacaaaggttccttcccaaccccgcaggcgttcagttggaagaccctgagtttcaggccagcaatattatgcactcaatcaacggctatgtgtttgatagtctccagctttctgtttgcctccatgaagtagcctattggtacatcttgtcaattggtgctcaaacagacttcctctccgtcttcttctccggctacacctttaagcacaagatggtgtatgaggacactctcacactctttccattttctggagaaaccgtgttcatgagcatggagaatccaggcctttggatcttgggttgccacaacagtgattttcgcaatcggggaatgactgctctcctcaaagtcagcagctgtgataagaacacaggcgactattacgaagattcttacgaggacataagtgcctacttgttgtccaagaataacgccattgagcccagatcattctcccagaatcctcccgtgcttaaaaggcatcagcgcgaaatcaccagaactactcttcagtctgatcaagaggagattgactatgacgacaccataagcgtggaaatgaagaaggaggatttcgatatctatgacgaagatgagaaccagtctccgcggagctttcagaagaagacgcgacactacttcattgcagcagtcgaaaggctttgggactacggtatgtcatcatcccctcatgtgttgcgcaatagagctcagagtggaagtgttccacagttcaagaaagtcgtctttcaagagtttacagatggcagcttcacacagcctctctatcggggcgagcttaacgaacatttgggactccttggtccctatatccgagccgaagtggaggacaacattatggttacctttaggaatcaagcctctcgcccctacagcttctactcctccctcatcagttatgaggaggatcagagacaaggcgctgaaccacggaagaactttgtgaaaccgaatgagacgaagacctacttctggaaagtacagcaccacatggcccccacaaaagacgaattcgattgcaaagcatgggcgtatttttcagacgttgacttggagaaagatgtacattcaggacttattggtcctttgttggtgtgtcacactaacactctcaatccagcccatggcaggcaggtgacagtccaggaattcgctcttttctttaccatctttgatgagaccaagtcctggtacttcacggaaaacatggagcgcaattgcagagccccctgtaacatacagatggaggaccctacctttaaggaaaattatcggttccacgcaatcaacggatacattatggatacactccctggccttgtgatggctcaggaccaacgaatcaggtggtacctcctcagcatgggttctaatgagaacatacactccattcacttttcaggacatgtgttcactgtccggaagaaagaagagtataagatggccctctacaatttgtatccaggcgtgtttgagaccgttgaaatgcttccctctaaagctggcatctggagagtagagtgcttgatcggagaacatcttcacgcaggtatgagcaccttgttcctcgtgtacagcaacaaatgtcagaccccacttggcatggccagtggacacattcgcgactttcagatcacagcatctggccagtatggacaatgggccccaaagttggctcgcctccattactccggtagcataaatgcgtggtccactaaagaacctttcagctggattaaggtcgatcttcttgcccccatgatcatccacggcattaagacacagggagcgaggcagaaattctcctccctctacatctcacagttcattattatgtatagtttggacggcaagaagtggcaaacttatagaggtaacagtactggaacactcatggtgttcttcggcaacgttgatagctctggcatcaaacacaacatctttaatcctcccataatagctcggtacatcagattgcatccgacccactacagcattaggagtacactccgaatggagcttatgggttgcgacttgaattcctgttcaatgccactcggaatggagtctaaagccatctctgatgcacagataaccgccagtagctactttacgaacatgtttgctacgtggtcaccctctaaggcaaggcttcatttgcaaggccggtctaatgcctggagacctcaggtgaacaacccgaaagaatggctccaggtggactttcagaagaccatgaaagtaacaggtgtcactactcagggagttaagtccttgctcaccagcatgtatgtgaaggagttccttatttcctcatcacaagatggccaccagtggaccctcttctttcagaatggtaaggtcaaagtgtttcagggcaatcaagactggttcacacccgtggtgaacagtcttgatcctccactcttgacacgataccttcgaatccatccacagtcttgggttcaccagattgcattgcgcatggaagtacttggatgcgaggctcaggacctctac

SEQ ID NO: 2584 - protein, 1457 aa, synthetic construct
  REGION 1..1457: note = Variant of human B-domain deleted Factor VIII
MQIELSTCFFLCLLRFCFSATRRYYLGAVELSWDYMQSDLGELPVDARFPPRVPKSFPFNTSVVYKKTLFVEFTDHLFNIAKPRPPWMGLLGPTIQAEVYDTVVITLKNMASHPVSLHAVGVSYWKASEGAEYDDQTSQREKEDDKVFPGGSHTYVWQVLKENGPMASDPLCLTYSYLSHVDLVKDLNSGLIGALLVCREGSLAKEKTQTLHKFILLFAVFDEGKSWHSETKNSLMQDRDAASARAWPKMHTVNGYVNRSLPGLIGCHRKSVYWHVIGMGTTPEVHSIFLEGHTFLVRNHRQASLEISPITFLTAQTLLMDLGQFLLFCHISSHQHDGMEAYVKVDSCPEEPQLRMKNNEEAEDYDDDLTDSEMDVVRFDDDNSPSFIQIRSVAKKHPKTWVHYIAAEEEDWDYAPLVLAPDDRSYKSQYLNNGPQRIGRKYKKVRFMAYTDETFKTREAIQHESGILGPLLYGEVGDTLLIIFKNQASRPYNIYPHGITDVRPLYSRRLPKGVKHLKDFPILPGEIFKYKWTVTVEDGPTKSDPRCLTRYYSSFVNMERDLASGLIGPLLICYKESVDQRGNQIMSDKRNVILFSVFDENRSWYLTENIQRFLPNPAGVQLEDPEFQASNIMHSINGYVFDSLQLSVCLHEVAYWYILSIGAQTDFLSVFFSGYTFKHKMVYEDTLTLFPFSGETVFMSMENPGLWILGCHNSDFRNRGMTALLKVSSCDKNTGDYYEDSYEDISAYLLSKNNAIEPRSFSQNPPVLKRHQREITRTTLQSDQEEIDYDDTISVEMKKEDFDIYDEDENQSPRSFQKKTRHYFIAAVERLWDYGMSSSPHVLRNRAQSGSVPQFKKVVFQEFTDGSFTQPLYRGELNEHLGLLGPYIRAEVEDNIMVTFRNQASRPYSFYSSLISYEEDQRQGAEPRKNFVKPNETKTYFWKVQHHMAPTKDEFDCKAWAYFSDVDLEKDVHSGLIGPLLVCHTNTLNPAHGRQVTVQEFALFFTIFDETKSWYFTENMERNCRAPCNIQMEDPTFKENYRFHAINGYIMDTLPGLVMAQDQRIRWYLLSMGSNENIHSIHFSGHVFTVRKKEEYKMALYNLYPGVFETVEMLPSKAGIWRVECLIGEHLHAGMSTLFLVYSNKCQTPLGMASGHIRDFQITASGQYGQWAPKLARLHYSGSINAWSTKEPFSWIKVDLLAPMIIHGIKTQGARQKFSSLYISQFIIMYSLDGKKWQTYRGNSTGTLMVFFGNVDSSGIKHNIFNPPIIARYIRLHPTHYSIRSTLRMELMGCDLNSCSMPLGMESKAISDAQITASSYFTNMFATWSPSKARLHLQGRSNAWRPQVNNPKEWLQVDFQKTMKVTGVTTQGVKSLLTSMYVKEFLISSSQDGHQWTLFFQNGKVKVFQGNQDWFTPVVNSLDPPLLTRYLRIHPQSWVHQIALRMEVLGCEAQDLY

SEQ ID NO: 2585 - DNA, 4371 bp, synthetic construct
  misc_feature 1..4371: note = Variant of human B-domain deleted Factor VIII
  source 1..4371: mol_type = other DNA
atgcagattgaactgtctacctgcttcttcctctgtttgctgaggttctgctttagcgccactagacggtactaccttggcgctgtggagctgtcctgggactatatgcagagtgatttgggagagcttcccgtcgacgcacgatttcctcctcgcgttccaaagtcatttcccttcaacacaagcgtggtgtacaagaagacgctcttcgtcgaattcaccgatcacctgttcaatatcgccaaacccagaccaccatggatgggtcttttggggcctaccatacaagcggaggtgtatgacacagttgttatcactctcaagaacatggcttctcatccggtaagtcttcacgcagtgggcgtgtcctactggaaagcttcagaaggagccgagtatgatgatcagacatcccagagggagaaagaagacgacaaggtatttccaggtgggtctcatacctatgtgtggcaagtgctcaaagagaatggccctatggcaagcgatccgctctgtttgacttacagctacctttcacacgttgacctcgtcaaggacctcaactccgggttgattggagccttgttggtatgcagggaaggatctcttgccaaagagaagacacagaccctccacaagtttatccttctctttgctgtgttcgatgagggcaaaagttggcatagcgaaacgaagaattccctcatgcaggatcgcgacgcagccagcgccagagcttggcccaagatgcacactgtgaacggatatgtcaataggtcacttcctggcttgattgggtgtcatcggaaaagtgtctactggcacgtgatcggaatggggacaacaccagaggtccactccatatttctcgaaggccataccttccttgttcgaaaccacagacaggcatccttggagatctctcccattacctttctcactgcccaaacgctccttatggacttgggtcagttccttctcttctgccatatcagctcacaccagcatgatggtatggaagcttatgtgaaagtcgacagttgtcctgaggagccacagttgcgcatgaagaataatgaagaagccgaggattacgacgacgatctcaccgattctgagatggacgtggtgaggtttgatgacgacaactctccctccttcattcaaatccggagcgtggcgaagaaacaccccaagacttgggtccactatatagcggcggaagaggaggattgggattacgctcctcttgtattggcaccagatgaccgctcatacaaaagccagtacctcaacaacggaccgcagagaattggccggaagtataagaaagtgcgatttatggcctatacagacgaaacctttaagacaagggaggccatccagcatgagagtgggattttgggacctcttctttacggcgaagttggtgataccctcctcatcatcttcaagaatcaagcttctcgcccctataacatttacccacacgggatcactgacgttaggcctttgtatagcagaagacttcccaaaggcgtgaagcatctcaaagacttccccattttgccaggcgagatctttaagtacaaatggaccgtcacagtggaagatggaccgactaaatcagaccctcgatgccttacgcggtactattcctccttcgtgaatcttgagagagatttggcaagcggactcataggaccactcctcatctgttacaaggaatctgtagaccagaggggtaaccagattatgagtgataaacgcaatgtgatcctttttagcgtcttcgacgagaaccggtcctggtacttgaccgagaatatacaaaggttccttcccaaccccgcaggcgttcagttggaagaccctgagtttcaggccagcaatattatgcactcaatcaacggctatgtgtttgatagtctccagctttctgtttgcctccatgaagtagcctattggtacatcttgtcaattggtgctcaaacagacttcctctccgtcttcttctccggctacacctttaagcacaagatggtgtatgaggacactctcacactctttccattttctggagaaaccgtgttcatgagcatggagaatccaggcctttggatcttgggttgccacaacagtgattttcgcaatcggggaatgactgctctcctcaaagtcagcagctgtgataagaacacaggcgactattacgaagattcttacgaggacataagtgcctacttgttgtccaagaataacgccattgagcccagatcattctcccagaatcctcccgtgcttaaaaggcatcagcgcgaaatcaccagaactactcttcagtctgatcaagaggagattgactatgacgacaccataagcgtggaaatgaagaaggaggatttcgatatctatgacgaagatgagaaccagtctccgcggagctttcagaagaagacgcgacactacttcattgcagcagtcgaaaggctttgggactacggtatgtcatcatcccctcatgtgttgcgcaatagagctcagagtggaagtgttccacagttcaagaaagtcgtctttcaagagtttacagatggcagcttcacacagcctctctatcggggcgagcttaacgaacatttgggactccttggtccctatatccgagccgaagtggaggacaacattatggttacctttaggaatcaagcctctcgcccctacagcttctactcctccctcatcagttatgaggaggatcagagacaaggcgctgaaccacggaagaactttgtgaaaccgaatgagacgaagacctacttctggaaagtacagcaccacatggcccccacaaaagacgaattcgattgcaaagcatgggcgtatttttcagacgttgacttggagaaagatgtacattcaggacttattggtcctttgttggtgtgtcacactaacactctcaatccagcccatggcaggcaggtgacagtccaggaattcgctcttttctttaccatctttgatgagaccaagtcctggtacttcacggaaaacatggagcgcaattgcagagccccctgtaacatacagatggaggaccctacctttaaggaaaattatcggttccacgcaatcaacggatacattatggatacactccctggccttgtgatggctcaggaccaacgaatcaggtggtacctcctcagcatgggttctaatgagaacatacactccattcacttttcaggacatgtgttcactgtccggaagaaagaagagtataagatggccctctacaatttgtatccaggcgtgtttgagaccgttgaaatgcttccctctaaagctggcatctggagagtagagtgcttgatcggagaacatcttcacgcaggtatgagcaccttgttcctcgtgtacagcaacaaatgtcagaccccacttggcatggccagtggacacattcgcgactttcagatcacagcatctggccagtatggacaatgggccccaaagttggctcgcctccattactccggtagcataaatgcgtggtccactaaagaacctttcagctggattaaggtcgatcttcttgcccccatgatcatccacggcattaagacacagggagcgaggcagaaattctcctccctctacatctcacagttcattattatgtatagtttggacggcaagaagtggcaaacttatagaggtaacagtactggaacactcatggtgttcttcggcaacgttgatagctctggcatcaaacacaacatctttaatcctcccataatagctcggtacatcagattgcatccgacccactacagcattaggagtacactccgaatggagcttatgggttgcgacttgaattcctgttcaatgccactcggaatggagtctaaagccatctctgatgcacagataaccgccagtagctactttacgaacatgtttgctacgtggtcaccctctaaggcaaggcttcatttgcaaggccggtctaatgcctggagacctcaggtgaacaacccgaaagaatggctccaggtggactttcagaagaccatgaaagtaacaggtgtcactactcagggagttaagtccttgctcaccagcatgtatgtgaaggagttccttatttcctcatcacaagatggccaccagtggaccctcttctttcagaatggtaaggtcaaagtgtttcagggcaatcaagacagcttcacacccgtggtgaacagtcttgatcctccactcttgacacgataccttcgaatccatccacagtcttgggttcaccagattgcattgcgcatggaagtacttggatgcgaggctcaggacctctac

SEQ ID NO: 2586 - protein, 1457 aa, synthetic construct
  REGION 1..1457: note = Variant of human B-domain deleted Factor VIII
MQIELSTCFFLCLLRFCFSATRRYYLGAVELSWDYMQSDLGELPVDARFPPRVPKSFPFNTSVVYKKTLFVEFTDHLFNIAKPRPPWMGLLGPTIQAEVYDTVVITLKNMASHPVSLHAVGVSYWKASEGAEYDDQTSQREKEDDKVFPGGSHTYVWQVLKENGPMASDPLCLTYSYLSHVDLVKDLNSGLIGALLVCREGSLAKEKTQTLHKFILLFAVFDEGKSWHSETKNSLMQDRDAASARAWPKMHTVNGYVNRSLPGLIGCHRKSVYWHVIGMGTTPEVHSIFLEGHTFLVRNHRQASLEISPITFLTAQTLLMDLGQFLLFCHISSHQHDGMEAYVKVDSCPEEPQLRMKNNEEAEDYDDDLTDSEMDVVRFDDDNSPSFIQIRSVAKKHPKTWVHYIAAEEEDWDYAPLVLAPDDRSYKSQYLNNGPQRIGRKYKKVRFMAYTDETFKTREAIQHESGILGPLLYGEVGDTLLIIFKNQASRPYNIYPHGITDVRPLYSRRLPKGVKHLKDFPILPGEIFKYKWTVTVEDGPTKSDPRCLTRYYSSFVNLERDLASGLIGPLLICYKESVDQRGNQIMSDKRNVILFSVFDENRSWYLTENIQRFLPNPAGVQLEDPEFQASNIMHSINGYVFDSLQLSVCLHEVAYWYILSIGAQTDFLSVFFSGYTFKHKMVYEDTLTLFPFSGETVFMSMENPGLWILGCHNSDFRNRGMTALLKVSSCDKNTGDYYEDSYEDISAYLLSKNNAIEPRSFSQNPPVLKRHQREITRTTLQSDQEEIDYDDTISVEMKKEDFDIYDEDENQSPRSFQKKTRHYFIAAVERLWDYGMSSSPHVLRNRAQSGSVPQFKKVVFQEFTDGSFTQPLYRGELNEHLGLLGPYIRAEVEDNIMVTFRNQASRPYSFYSSLISYEEDQRQGAEPRKNFVKPNETKTYFWKVQHHMAPTKDEFDCKAWAYFSDVDLEKDVHSGLIGPLLVCHTNTLNPAHGRQVTVQEFALFFTIFDETKSWYFTENMERNCRAPCNIQMEDPTFKENYRFHAINGYIMDTLPGLVMAQDQRIRWYLLSMGSNENIHSIHFSGHVFTVRKKEEYKMALYNLYPGVFETVEMLPSKAGIWRVECLIGEHLHAGMSTLFLVYSNKCQTPLGMASGHIRDFQITASGQYGQWAPKLARLHYSGSINAWSTKEPFSWIKVDLLAPMIIHGIKTQGARQKFSSLYISQFIIMYSLDGKKWQTYRGNSTGTLMVFFGNVDSSGIKHNIFNPPIIARYIRLHPTHYSIRSTLRMELMGCDLNSCSMPLGMESKAISDAQITASSYFTNMFATWSPSKARLHLQGRSNAWRPQVNNPKEWLQVDFQKTMKVTGVTTQGVKSLLTSMYVKEFLISSSQDGHQWTLFFQNGKVKVFQGNQDSFTPVVNSLDPPLLTRYLRIHPQSWVHQIALRMEVLGCEAQDLY

SEQ ID NO: 2587 - DNA, 4371 bp, synthetic construct
  misc_feature 1..4371: note = Variant of human B-domain deleted Factor VIII
  source 1..4371: mol_type = other DNA
atgcagattgaactgtctacctgcttcttcctctgtttgctgaggttctgctttagcgccactagacggtactaccttggcgctgtggagctgtcctgggactatatgcagagtgatttgggagagcttcccgtcgacgcacgatttcctcctcgcgttccaaagtcatttcccttcaacacaagcgtggtgtacaagaagacgctcttcgtcgaattcaccgatcacctgttcaatatcgccaaacccagaccaccatggatgggtcttttggggcctaccatacaagcggaggtgtatgacacagttgttatcactctcaagaacatggcttctcatccggtaagtcttcacgcagtgggcgtgtcctactggaaagcttcagaaggagccgagtatgatgatcagacatcccagagggagaaagaagacgacaaggtatttccaggtgggtctcatacctatgtgtggcaagtgctcaaagagaatggccctatggcaagcgatccgctctgtttgacttacagctacctttcacacgttgacctcgtcaaggacctcaactccgggttgattggagccttgttggtatgcagggaaggatctcttgccaaagagaagacacagaccctccacaagtttatccttctctttgctgtgttcgatgagggcaaaagttggcatagcgaaacgaagaattccctcatgcaggatcgcgacgcagccagcgccagagcttggcccaagatgcacactgtgaacggatatgtcaataggtcacttcctggcttgattgggtgtcatcggaaaagtgtctactggcacgtgatcggaatggggacaacaccagaggtccactccatatttctcgaaggccataccttccttgttcgaaaccacagacaggcatccttggagatctctcccattacctttctcactgcccaaacgcagcttatggacttgggtcagttccttctcttctgccatatcagctcacaccagcatgatggtatggaagcttatgtgaaagtcgacagttgtcctgaggagccacagttgcgcatgaagaataatgaagaagccgaggattacgacgacgatctcaccgattctgagatggacgtggtgaggtttgatgacgacaactctccctccttcattcaaatccggagcgtggcgaagaaacaccccaagacttgggtccactatatagcggcggaagaggaggattgggattacgctcctcttgtattggcaccagatgaccgctcatacaaaagccagtacctcaacaacggaccgcagagaattggccggaagtataagaaagtgcgatttatggcctatacagacgaaacctttaagacaagggaggccatccagcatgagagtgggattttgggacctcttctttacggcgaagttggtgataccctcctcatcatcttcaagaatcaagcttctcgcccctataacatttacccacacgggatcactgacgttaggcctttgtatagcagaagacttcccaaaggcgtgaagcatctcaaagacttccccattttgccaggcgagatctttaagtacaaatggaccgtcacagtggaagatggaccgactaaatcagaccctcgatgccttacgcggtactattcctccttcgtgaatatggagagagatttggcaagcggactcataggaccactcctcatctgttacaaggaatctgtagaccagaggggtaaccagattatgagtgataaacgcaatgtgatcctttttagcgtcttcgacgagaaccggtcctggtacttgaccgagaatatacaaaggttccttcccaaccccgcaggcgttcagttggaagaccctgagtttcaggccagcaatattatgcactcaatcaacggctatgtgtttgatagtctccagctttctgtttgcctccatgaagtagcctattggtacatcttgtcaattggtgctcaaacagacttcctctccgtcttcttctccggctacacctttaagcacaagatggtgtatgaggacactctcacactctttccattttctggagaaaccgtgttcatgagcatggagaatccaggcctttggatcttgggttgccacaacagtgattttcgcaatcggggaatgactgctctcctcaaagtcagcagctgtgataagaacacaggcgactattacgaagattcttacgaggacataagtgcctacttgttgtccaagaataacgccattgagcccagatcattctcccagaatcctcccgtgcttaaaaggcatcagcgcgaaatcaccagaactactcttcagtctgatcaagaggagattgactatgacgacaccataagcgtggaaatgaagaaggaggatttcgatatctatgacgaagatgagaaccagtctccgcggagctttcagaagaagacgcgacactacttcattgcagcagtcgaaaggctttgggactacggtatgtcatcatcccctcatgtgttgcgcaatagagctcagagtggaagtgttccacagttcaagaaagtcgtctttcaagagtttacagatggcagcttcacacagcctctctatcggggcgagcttaacgaacatttgggactccttggtccctatatccgagccgaagtggaggacaacattatggttacctttaggaatcaagcctctcgcccctacagcttctactcctccctcatcagttatgaggaggatcagagacaaggcgctgaaccacggaagaactttgtgaaaccgaatgagacgaagacctacttctggaaagtacagcaccacatggcccccacaaaagacgaattcgattgcaaagcatgggcgtatttttcagacgttgacttggagaaagatgtacattcaggacttattggtcctttgttggtgtgtcacactaacactctcaatccagcccatggcaggcaggtgacagtccaggaattcgctcttttctttaccatctttgatgagaccaagtcctggtacttcacggaaaacatggagcgcaattgcagagccccctgtaacatacagatggaggaccctacctttaaggaaaattatcggttccacgcaatcaacggatacattatggatacactccctggccttgtgatggctcaggaccaacgaatcaggtggtacctcctcagcatgggttctaatgagaacatacactccattcacttttcaggacatgtgttcactgtccggaagaaagaagagtataagatggccctctacaatttgtatccaggcgtgtttgagaccgttgaaatgcttccctctaaagctggcatctggagagtagagtgcttgatcggagaacatcttcacgcaggtatgagcaccttgttcctcgtgtacagcaacaaatgtcagaccccacttggcatggccagtggacacattcgcgactttcagatcacagcatctggccagtatggacaatgggccccaaagttggctcgcctccattactccggtagcataaatgcgtggtccactaaagaacctttcagctggattaaggtcgatcttcttgcccccatgatcatccacggcattaagacacagggagcgaggcagaaattctcctccctctacatctcacagttcattattatgtatagtttggacggcaagaagtggcaaacttatagaggtaacagtactggaacactcatggtgttcttcggcaacgttgatagctctggcatcaaacacaacatctttaatcctcccataatagctcggtacatcagattgcatccgacccactacagcattaggagtacactccgaatggagcttatgggttgcgacttgaattcctgttcaatgccactcggaatggagtctaaagccatctctgatgcacagataaccgccagtagctactttacgaacatgtttgctacgtggtcaccctctaaggcaaggcttcatttgcaaggccggtctaatgcctggagacctcaggtgaacaacccgaaagaatggctccaggtggactttcagaagaccatgaaagtaacaggtgtcactactcagggagttaagtccttgctcaccagcatgtatgtgaaggagttccttatttcctcatcacaagatggccaccagtggaccctcttctttcagaatggtaaggtcaaagtgtttcagggcaatcaagacagcttcacacccgtggtgaacagtcttgatcctccactcttgacacgataccttcgaatccatccacagtcttgggttcaccagattgcattgcgcatggaagtacttggatgcgaggctcaggacctctac

SEQ ID NO: 2588 - protein, 1457 aa, synthetic construct
  REGION 1..1457: note = Variant of human B-domain deleted Factor VIII
MQIELSTCFFLCLLRFCFSATRRYYLGAVELSWDYMQSDLGELPVDARFPPRVPKSFPFNTSVVYKKTLFVEFTDHLFNIAKPRPPWMGLLGPTIQAEVYDTVVITLKNMASHPVSLHAVGVSYWKASEGAEYDDQTSQREKEDDKVFPGGSHTYVWQVLKENGPMASDPLCLTYSYLSHVDLVKDLNSGLIGALLVCREGSLAKEKTQTLHKFILLFAVFDEGKSWHSETKNSLMQDRDAASARAWPKMHTVNGYVNRSLPGLIGCHRKSVYWHVIGMGTTPEVHSIFLEGHTFLVRNHRQASLEISPITFLTAQTQLMDLGQFLLFCHISSHQHDGMEAYVKVDSCPEEPQLRMKNNEEAEDYDDDLTDSEMDVVRFDDDNSPSFIQIRSVAKKHPKTWVHYIAAEEEDWDYAPLVLAPDDRSYKSQYLNNGPQRIGRKYKKVRFMAYTDETFKTREAIQHESGILGPLLYGEVGDTLLIIFKNQASRPYNIYPHGITDVRPLYSRRLPKGVKHLKDFPILPGEIFKYKWTVTVEDGPTKSDPRCLTRYYSSFVNMERDLASGLIGPLLICYKESVDQRGNQIMSDKRNVILFSVFDENRSWYLTENIQRFLPNPAGVQLEDPEFQASNIMHSINGYVFDSLQLSVCLHEVAYWYILSIGAQTDFLSVFFSGYTFKHKMVYEDTLTLFPFSGETVFMSMENPGLWILGCHNSDFRNRGMTALLKVSSCDKNTGDYYEDSYEDISAYLLSKNNAIEPRSFSQNPPVLKRHQREITRTTLQSDQEEIDYDDTISVEMKKEDFDIYDEDENQSPRSFQKKTRHYFIAAVERLWDYGMSSSPHVLRNRAQSGSVPQFKKVVFQEFTDGSFTQPLYRGELNEHLGLLGPYIRAEVEDNIMVTFRNQASRPYSFYSSLISYEEDQRQGAEPRKNFVKPNETKTYFWKVQHHMAPTKDEFDCKAWAYFSDVDLEKDVHSGLIGPLLVCHTNTLNPAHGRQVTVQEFALFFTIFDETKSWYFTENMERNCRAPCNIQMEDPTFKENYRFHAINGYIMDTLPGLVMAQDQRIRWYLLSMGSNENIHSIHFSGHVFTVRKKEEYKMALYNLYPGVFETVEMLPSKAGIWRVECLIGEHLHAGMSTLFLVYSNKCQTPLGMASGHIRDFQITASGQYGQWAPKLARLHYSGSINAWSTKEPFSWIKVDLLAPMIIHGIKTQGARQKFSSLYISQFIIMYSLDGKKWQTYRGNSTGTLMVFFGNVDSSGIKHNIFNPPIIARYIRLHPTHYSIRSTLRMELMGCDLNSCSMPLGMESKAISDAQITASSYFTNMFATWSPSKARLHLQGRSNAWRPQVNNPKEWLQVDFQKTMKVTGVTTQGVKSLLTSMYVKEFLISSSQDGHQWTLFFQNGKVKVFQGNQDSFTPVVNSLDPPLLTRYLRIHPQSWVHQIALRMEVLGCEAQDLY

SEQ ID NO: 2589 - DNA, 4371 bp, synthetic construct
  misc_feature 1..4371: note = Variant of human B-domain deleted Factor VIII
  source 1..4371: mol_type = other DNA
atgcagattgaactgtctacctgcttcttcctctgtttgctgaggttctgctttagcgccactagacggtactaccttggcgctgtggagctgtcctgggactatatgcagagtgatttgggagagcttcccgtcgacgcacgatttcctcctcgcgttccaaagtcatttcccttcaacacaagcgtggtgtacaagaagacgctcttcgtcgaattcaccgatcacctgttcaatatcgccaaacccagaccaccatggatgggtcttttggggcctaccatacaagcggaggtgtatgacacagttgttatcactctcaagaacatggcttctcatccggtaagtcttcacgcagtgggcgtgtcctactggaaagcttcagaaggagccgagtatgatgatcagacatcccagagggagaaagaagacgacaaggtatttccaggtgggtctcatacctatgtgtggcaagtgctcaaagagaatggccctatggcaagcgatccgctctgtttgacttacagctacctttcacacgttgacctcgtcaaggacctcaactccgggttgattggagccttgttggtatgcagggaaggatctcttgccaaagagaagacacagaccctccacaagtttatccttctctttgctgtgttcgatgagggcaaaagttggcatagcgaaacgaagaattccctcatgcaggatcgcgacgcagccagcgccagagcttggcccaagatgcacactgtgaacggatatgtcaataggtcacttcctggcttgattgggtgtcatcggaaaagtgtctactggcacgtgatcggaatggggacaacaccagaggtccactccatatttctcgaaggccataccttccttgttcgaaaccacagacaggcatccttggagatctctcccattacctttctcactgcccaaacgctccttatggacttgggtcagttccttctcttctgccatatcagctcacaccagcatgatggtatggaagcttatgtgaaagtcgacagttgtcctgaggagccacagttgcgcatgaagaataatgaagaagccgaggattacgacgacgatctcaccgattctgagatggacgtggtgaggtttgatgacgacaactctccctccttcattcaaatccggagccaggcgaagaaacaccccaagacttgggtccactatatagcggcggaagaggaggattgggattacgctcctcttgtattggcaccagatgaccgctcatacaaaagccagtacctcaacaacggaccgcagagaattggccggaagtataagaaagtgcgatttatggcctatacagacgaaacctttaagacaagggaggccatccagcatgagagtgggattttgggacctcttctttacggcgaagttggtgataccctcctcatcatcttcaagaatcaagcttctcgcccctataacatttacccacacgggatcactgacgttaggcctttgtatagcagaagacttcccaaaggcgtgaagcatctcaaagacttccccattttgccaggcgagatctttaagtacaaatggaccgtcacagtggaagatggaccgactaaatcagaccctcgatgccttacgcggtactattcctccttcgtgaatatggagagagatttggcaagcggactcataggaccactcctcatctgttacaaggaatctgtagaccagaggggtaaccagattatgagtgataaacgcaatgtgatcctttttagcgtcttcgacgagaaccggtcctggtacttgaccgagaatatacaaaggttccttcccaaccccgcaggcgttcagttggaagaccctgagtttcaggccagcaatattatgcactcaatcaacggctatgtgtttgatagtctccagctttctgtttgcctccatgaagtagcctattggtacatcttgtcaattggtgctcaaacagacttcctctccgtcttcttctccggctacacctttaagcacaagatggtgtatgaggacactctcacactctttccattttctggagaaaccgtgttcatgagcatggagaatccaggcctttggatcttgggttgccacaacagtgattttcgcaatcggggaatgactgctctcctcaaagtcagcagctgtgataagaacacaggcgactattacgaagattcttacgaggacataagtgcctacttgttgtccaagaataacgccattgagcccagatcattctcccagaatcctcccgtgcttaaaaggcatcagcgcgaaatcaccagaactactcttcagtctgatcaagaggagattgactatgacgacaccataagcgtggaaatgaagaaggaggatttcgatatctatgacgaagatgagaaccagtctccgcggagctttcagaagaagacgcgacactacttcattgcagcagtcgaaaggctttgggactacggtatgtcatcatcccctcatgtgttgcgcaatagagctcagagtggaagtgttccacagttcaagaaagtcgtctttcaagagtttacagatggcagcttcacacagcctctctatcggggcgagcttaacgaacatttgggactccttggtccctatatccgagccgaagtggaggacaacattatggttacctttaggaatcaagcctctcgcccctacagcttctactcctccctcatcagttatgaggaggatcagagacaaggcgctgaaccacggaagaactttgtgaaaccgaatgagacgaagacctacttctggaaagtacagcaccacatggcccccacaaaagacgaattcgattgcaaagcatgggcgtatttttcagacgttgacttggagaaagatgtacattcaggacttattggtcctttgttggtgtgtcacactaacactctcaatccagcccatggcaggcaggtgacagtccaggaattcgctcttttctttaccatctttgatgagaccaagtcctggtacttcacggaaaacatggagcgcaattgcagagccccctgtaacatacagatggaggaccctacctttaaggaaaattatcggttccacgcaatcaacggatacattatggatacactccctggccttgtgatggctcaggaccaacgaatcaggtggtacctcctcagcatgggttctaatgagaacatacactccattcacttttcaggacatgtgttcactgtccggaagaaagaagagtataagatggccctctacaatttgtatccaggcgtgtttgagaccgttgaaatgcttccctctaaagctggcatctggagagtagagtgcttgatcggagaacatcttcacgcaggtatgagcaccttgttcctcgtgtacagcaacaaatgtcagaccccacttggcatggccagtggacacattcgcgactttcagatcacagcatctggccagtatggacaatgggccccaaagttggctcgcctccattactccggtagcataaatgcgtggtccactaaagaacctttcagctggattaaggtcgatcttcttgcccccatgatcatccacggcattaagacacagggagcgaggcagaaattctcctccctctacatctcacagttcattattatgtatagtttggacggcaagaagtggcaaacttatagaggtaacagtactggaacactcatggtgttcttcggcaacgttgatagctctggcatcaaacacaacatctttaatcctcccataatagctcggtacatcagattgcatccgacccactacagcattaggagtacactccgaatggagcttatgggttgcgacttgaattcctgttcaatgccactcggaatggagtctaaagccatctctgatgcacagataaccgccagtagctactttacgaacatgtttgctacgtggtcaccctctaaggcaaggcttcatttgcaaggccggtctaatgcctggagacctcaggtgaacaacccgaaagaatggctccaggtggactttcagaagaccatgaaagtaacaggtgtcactactcagggagttaagtccttgctcaccagcatgtatgtgaaggagttccttatttcctcatcacaagatggccaccagtggaccctcttctttcagaatggtaaggtcaaagtgtttcagggcaatcaagacagcttcacacccgtggtgaacagtcttgatcctccactcttgacacgataccttcgaatccatccacagtcttgggttcaccagattgcattgcgcatggaagtacttggatgcgaggctcaggacctctac

SEQ ID NO: 2590 - protein, 1457 aa, synthetic construct
  REGION 1..1457: note = Variant of human B-domain deleted Factor VIII
MQIELSTCFFLCLLRFCFSATRRYYLGAVELSWDYMQSDLGELPVDARFPPRVPKSFPFNTSVVYKKTLFVEFTDHLFNIAKPRPPWMGLLGPTIQAEVYDTVVITLKNMASHPVSLHAVGVSYWKASEGAEYDDQTSQREKEDDKVFPGGSHTYVWQVLKENGPMASDPLCLTYSYLSHVDLVKDLNSGLIGALLVCREGSLAKEKTQTLHKFILLFAVFDEGKSWHSETKNSLMQDRDAASARAWPKMHTVNGYVNRSLPGLIGCHRKSVYWHVIGMGTTPEVHSIFLEGHTFLVRNHRQASLEISPITFLTAQTLLMDLGQFLLFCHISSHQHDGMEAYVKVDSCPEEPQLRMKNNEEAEDYDDDLTDSEMDVVRFDDDNSPSFIQIRSQAKKHPKTWVHYIAAEEEDWDYAPLVLAPDDRSYKSQYLNNGPQRIGRKYKKVRFMAYTDETFKTREAIQHESGILGPLLYGEVGDTLLIIFKNQASRPYNIYPHGITDVRPLYSRRLPKGVKHLKDFPILPGEIFKYKWTVTVEDGPTKSDPRCLTRYYSSFVNMERDLASGLIGPLLICYKESVDQRGNQIMSDKRNVILFSVFDENRSWYLTENIQRFLPNPAGVQLEDPEFQASNIMHSINGYVFDSLQLSVCLHEVAYWYILSIGAQTDFLSVFFSGYTFKHKMVYEDTLTLFPFSGETVFMSMENPGLWILGCHNSDFRNRGMTALLKVSSCDKNTGDYYEDSYEDISAYLLSKNNAIEPRSFSQNPPVLKRHQREITRTTLQSDQEEIDYDDTISVEMKKEDFDIYDEDENQSPRSFQKKTRHYFIAAVERLWDYGMSSSPHVLRNRAQSGSVPQFKKVVFQEFTDGSFTQPLYRGELNEHLGLLGPYIRAEVEDNIMVTFRNQASRPYSFYSSLISYEEDQRQGAEPRKNFVKPNETKTYFWKVQHHMAPTKDEFDCKAWAYFSDVDLEKDVHSGLIGPLLVCHTNTLNPAHGRQVTVQEFALFFTIFDETKSWYFTENMERNCRAPCNIQMEDPTFKENYRFHAINGYIMDTLPGLVMAQDQRIRWYLLSMGSNENIHSIHFSGHVFTVRKKEEYKMALYNLYPGVFETVEMLPSKAGIWRVECLIGEHLHAGMSTLFLVYSNKCQTPLGMASGHIRDFQITASGQYGQWAPKLARLHYSGSINAWSTKEPFSWIKVDLLAPMIIHGIKTQGARQKFSSLYISQFIIMYSLDGKKWQTYRGNSTGTLMVFFGNVDSSGIKHNIFNPPIIARYIRLHPTHYSIRSTLRMELMGCDLNSCSMPLGMESKAISDAQITASSYFTNMFATWSPSKARLHLQGRSNAWRPQVNNPKEWLQVDFQKTMKVTGVTTQGVKSLLTSMYVKEFLISSSQDGHQWTLFFQNGKVKVFQGNQDSFTPVVNSLDPPLLTRYLRIHPQSWVHQIALRMEVLGCEAQDLY

SEQ ID NO: 2591 - DNA, 4371 bp, synthetic construct
  misc_feature 1..4371: note = Variant of human B-domain deleted Factor VIII
  source 1..4371: mol_type = other DNA
atgcagattgaactgtctacctgcttcttcctctgtttgctgaggttctgctttagcgccactagacggtactaccttggcgctgtggagctgtcctgggactatatgcagagtgatttgggagagcttcccgtcgacgcacgatttcctcctcgcgttccaaagtcatttcccttcaacacaagcgtggtgtacaagaagacgctcttcgtcgaattcaccgatcacctgttcaatatcgccaaacccagaccaccatggatgggtcttttggggcctaccatacaagcggaggtgtatgacacagttgttatcactctcaagaacatggcttctcatccggtaagtcttcacgcagtgggcgtgtcctactggaaagcttcagaaggagccgagtatgatgatcagacatcccagagggagaaagaagacgacaaggtatttccaggtgggtctcatacctatgtgtggcaagtgctcaaagagaatggccctatggcaagcgatccgctctgtttgacttacagctacctttcacacgttgacctcgtcaaggacctcaactccgggttgattggagccttgttggtatgcagggaaggatctcttgccaaagagaagacacagaccctccacaagtttatccttctctttgctgtgttcgatgagggcaaaagttggcatagcgaaacgaagaattccctcatgcaggatcgcgacgcagccagcgccagagcttggcccaagatgcacactgtgaacggatatgtcaataggtcacttcctggcttgattgggtgtcatcggaaaagtgtctactggcacgtgatcggaatggggacaacaccagaggtccactccatatttctcgaaggccataccttccttgttcgaaaccacagacaggcatccttggagatctctcccattacctttctcactgcccaaacgctccttatggacttgggtcagttccttctcttctgccatatcagctcacaccagcatgatggtatggaagcttatgtgaaagtcgacagttgtcctgaggagccacagttgcgcatgaagaataatgaagaagccgaggattacgacgacgatctcaccgattctgagatggacgtggtgaggtttgatgacgacaactctccctccttcattcaaatccggagcgtggcgaagaaacaccccaagacttgggtccactatatagcggcggaagaggaggattgggattacgctcctcttgtattggcaccagatgaccgctcatacaaaagccagtacctcaacaacggaccgcagagaattggccggaagtataagaaagtgcgatttatggcctatacagacgaaacctttaagacaagggaggccatccagcatgagagtgggattttgggacctcttctttacggcgaagttggtgataccctcctcatcatcttcaagaatcaagcttctcgcccctataacatttacccacacgggatcactgacgttaggcctttgtatagcagaagacttcccaaaggcgtgaagcatctcaaagacttccccattttgccaggcgagatctttaagtacaaatggaccgtcacagtggaagatggaccgactaaatcagaccctcgatgccttacgcggtactattcctccttcgtgaatatggagagagatttggcaagcggactcataggaccactcctcatctgttacaaggaatctgtagaccagaggggtaaccagattatgagtgataaacgcaatgtgatcctttttagcgtcttcgacgagaaccggtcctggtacttgaccgagaatatacaaaggttccttcccaaccccgcaggcgttcagttggaagaccctgagtttcaggccagcaatattatgcactcaatcaacggctatgtgtttgatagtctccagctttctgtttgcctccatgaagtagcctattggtacatcttgtcaattggtgctcaaacagacttcctctccgtcttcttctccggctacacctttaagcacaagatggtgtatgaggacactctcacactctttccattttctggagaaaccgtgttcatgagcatggagaatccaggcctttggatcttgggttgccacaacagtgattttcgcaatcggggaatgactgctctcctcaaagtcagcagctgtgataagaacacaggcgactattacgaagattcttacgaggacataagtgcctacttgttgtccaagaataacgccattgagcccagatcattctcccagaatcctcccgtgcttaaaaggcatcagcgcgaaatcaccagaactactcttcagtctgatcaagaggagattgactatgacgacaccataagcgtggaaatgaagaaggaggatttcgatatctatgacgaagatgagaaccagtctccgcggagctttcagaagaagacgcgacactacttcattgcagcagtcgaaaggctttgggactacggtatgtcatcatcccctcatgtgttgcgcaatagagctcagagtggaagtgttccacagttcaagaaagtcgtctttcaagagtttacagatggcagcttcacacagcctctctatcggggcgagcttaacgaacatttgggactccttggtccctatatccgagccgaagtggaggacaacattatggttacctttaggaatcaagcctctcgcccctacagcttctactcctccctcatcagttatgaggaggatcagagacaaggcgctgaaccacggaagaactttgtgaaaccgaatgagacgaagacctacttctggaaagtacagcaccacatggcccccacaaaagacgaattcgattgcaaagcatgggcgtatttttcagacgttgacttggagaaagatgtacattcaggacttattggtcctttgttggtgtgtcacactaacactctcaatccagcccatggcaggcaggtgacagtccaggaattcgctcttttctttaccatctttgatgagaccaagtcctggtacttcacggaaaacatggagcgcaattgcagagccccctgtaacatacagatggaggaccctacctttaaggaaaattatcggttccacgcaatcaacggatacattatggatacactccctggccttgtgatggctcaggaccaacgaatcaggtggtacctcctcagcatgggttctaatgagaacatacactccattcacttttcaggacatgtgttcactgtccggaagaaagaagagtataagatggccctctacaatttgtatccaggcgtgtttgagaccgttgaaatgcttccctctaaagctggcatctggagagtagagtgcttgatcggagaacatcttcacgcaggtatgagcaccttgttcctcgtgtacagcaacaaatgtcaggagccacttggcatggccagtggacacattcgcgactttcagatcacagcatctggccagtatggacaatgggccccaaagttggctcgcctccattactccggtagcataaatgcgtggtccactaaagaacctttcagctggattaaggtcgatcttcttgcccccatgatcatccacggcattaagacacagggagcgaggcagaaattctcctccctctacatctcacagttcattattatgtatagtttggacggcaagaagtggcaaacttatagaggtaacagtactggaacactcatggtgttcttcggcaacgttgatagctctggcatcaaacacaacatctttaatcctcccataatagctcggtacatcagattgcatccgacccactacagcattaggagtacactccgaatggagcttatgggttgcgacttgaattcctgttcaatgccactcggaatggagtctaaagccatctctgatgcacagataaccgccagtagctactttacgaacatgtttgctacgtggtcaccctctaaggcaaggcttcatttgcaaggccggtctaatgcctggagacctcaggtgaacaacccgaaagaatggctccaggtggactttcagaagaccatgaaagtaacaggtgtcactactcagggagttaagtccttgctcaccagcatgtatgtgaaggagttccttatttcctcatcacaagatggccaccagtggaccctcttctttcagaatggtaaggtcaaagtgtttcagggcaatcaagacagcttcacacccgtggtgaacagtcttgatcctccactcttgacacgataccttcgaatccatccacagtcttgggttcaccagattgcattgcgcatggaagtacttggatgcgaggctcaggacctctac

SEQ ID NO: 2592 - protein, 1457 aa, synthetic construct
  REGION 1..1457: note = Variant of human B-domain deleted Factor VIII
MQIELSTCFFLCLLRFCFSATRRYYLGAVELSWDYMQSDLGELPVDARFPPRVPKSFPFNTSVVYKKTLFVEFTDHLFNIAKPRPPWMGLLGPTIQAEVYDTVVITLKNMASHPVSLHAVGVSYWKASEGAEYDDQTSQREKEDDKVFPGGSHTYVWQVLKENGPMASDPLCLTYSYLSHVDLVKDLNSGLIGALLVCREGSLAKEKTQTLHKFILLFAVFDEGKSWHSETKNSLMQDRDAASARAWPKMHTVNGYVNRSLPGLIGCHRKSVYWHVIGMGTTPEVHSIFLEGHTFLVRNHRQASLEISPITFLTAQTLLMDLGQFLLFCHISSHQHDGMEAYVKVDSCPEEPQLRMKNNEEAEDYDDDLTDSEMDVVRFDDDNSPSFIQIRSVAKKHPKTWVHYIAAEEEDWDYAPLVLAPDDRSYKSQYLNNGPQRIGRKYKKVRFMAYTDETFKTREAIQHESGILGPLLYGEVGDTLLIIFKNQASRPYNIYPHGITDVRPLYSRRLPKGVKHLKDFPILPGEIFKYKWTVTVEDGPTKSDPRCLTRYYSSFVNMERDLASGLIGPLLICYKESVDQRGNQIMSDKRNVILFSVFDENRSWYLTENIQRFLPNPAGVQLEDPEFQASNIMHSINGYVFDSLQLSVCLHEVAYWYILSIGAQTDFLSVFFSGYTFKHKMVYEDTLTLFPFSGETVFMSMENPGLWILGCHNSDFRNRGMTALLKVSSCDKNTGDYYEDSYEDISAYLLSKNNAIEPRSFSQNPPVLKRHQREITRTTLQSDQEEIDYDDTISVEMKKEDFDIYDEDENQSPRSFQKKTRHYFIAAVERLWDYGMSSSPHVLRNRAQSGSVPQFKKVVFQEFTDGSFTQPLYRGELNEHLGLLGPYIRAEVEDNIMVTFRNQASRPYSFYSSLISYEEDQRQGAEPRKNFVKPNETKTYFWKVQHHMAPTKDEFDCKAWAYFSDVDLEKDVHSGLIGPLLVCHTNTLNPAHGRQVTVQEFALFFTIFDETKSWYFTENMERNCRAPCNIQMEDPTFKENYRFHAINGYIMDTLPGLVMAQDQRIRWYLLSMGSNENIHSIHFSGHVFTVRKKEEYKMALYNLYPGVFETVEMLPSKAGIWRVECLIGEHLHAGMSTLFLVYSNKCQEPLGMASGHIRDFQITASGQYGQWAPKLARLHYSGSINAWSTKEPFSWIKVDLLAPMIIHGIKTQGARQKFSSLYISQFIIMYSLDGKKWQTYRGNSTGTLMVFFGNVDSSGIKHNIFNPPIIARYIRLHPTHYSIRSTLRMELMGCDLNSCSMPLGMESKAISDAQITASSYFTNMFATWSPSKARLHLQGRSNAWRPQVNNPKEWLQVDFQKTMKVTGVTTQGVKSLLTSMYVKEFLISSSQDGHQWTLFFQNGKVKVFQGNQDSFTPVVNSLDPPLLTRYLRIHPQSWVHQIALRMEVLGCEAQDLY

SEQ ID NO: 2593 - DNA, 4371 bp, synthetic construct
  misc_feature 1..4371: note = Variant of human B-domain deleted Factor VIII
  source 1..4371: mol_type = other DNA
atgcagattgaactgtctacctgcttcttcctctgtttgctgaggttctgctttagcgccactagacggtactaccttggcgctgtggagctgtcctgggactatatgcagagtgatttgggagagcttcccgtcgacgcacgatttcctcctcgcgttccaaagtcatttcccttcaacacaagcgtggtgtacaagaagacgctcttcgtcgaattcaccgatcacctgttcaatatcgccaaacccagaccaccatggatgggtcttttggggcctaccatacaagcggaggtgtatgacacagttgttatcactctcaagaacatggcttctcatccggtaagtcttcacgcagtgggcgtgtcctactggaaagcttcagaaggagccgagtatgatgatcagacatcccagagggagaaagaagacgacaaggtatttccaggtgggtctcatacctatgtgtggcaagtgctcaaagagaatggccctatggcaagcgatccgctctgtttgacttacagctacctttcacacgttgacctcgtcaaggacctcaactccgggttgattggagccttgttggtatgcagggaaggatctcttgccaaagagaagacacagaccctccacaagtttatccttctctttgctgtgttcgatgagggcaaaagttggcatagcgaaacgaagaattccctcatgcaggatcgcgacgcagccagcgccagagcttggcccaagatgcacactgtgaacggatatgtcaataggtcacttcctggcttgattgggtgtcatcggaaaagtgtctactggcacgtgatcggaatggggacaacaccagaggtccactccatatttctcgaaggccataccttccttgttcgaaaccacagacaggcatccttggagatctctcccattacctttctcactgcccaaacgctccttatggacttgggtcagttccttctcttctgccatatcagctcacaccagcatgatggtatggaagcttatgtgaaagtcgacagttgtcctgaggagccacagttgcgcatgaagaataatgaagaagccgaggattacgacgacgatctcaccgattctgagatggacgtggtgaggtttgatgacgacaactctccctccttcattcaaatccggagcgtggcgaagaaacaccccaagacttgggtccactatatagcggcggaagaggaggattgggattacgctcctcttgtattggcaccagatgaccgctcatacaaaagccagtacctcaacaacggaccgcagagaattggccggaagtataagaaagtgcgatttatggcctatacagacgaaacctttaagacaagggaggccatccagcatgagagtgggattttgggacctcttctttacggcgaagttggtgataccctcctcatcatcttcaagaatcaagcttctcgcccctataacatttacccacacgggatcactgacgttaggcctttgtatagcagaagacttcccaaaggcgtgaagcatctcaaagacttccccattttgccaggcgagatctttaagtacaaatggaccgtcacagtggaagatggaccgactaaatcagaccctcgatgccttacgcggtactattcctccttcgtgaatatggagagagatttggcaagcggactcataggaccactcctcatctgttacaaggaatctgtagaccagaggggtaaccagattatgagtgataaacgcaatgtgatcctttttagcgtcttcgacgagaaccggtcctggtacttgaccgagaatatacaaaggttccttcccaaccccgcaggcgttcagttggaagaccctgagtttcaggccagcaatattatgcactcaatcaacggctatgtgtttgatagtctccagctttctgtttgcctccatgaagtagcctattggtacatcttgtcaattggtgctcaaacagacttcctctccgtcttcttctccggctacacctttaagcacaagatggtgtatgaggacactctcacactctttccattttctggagaaaccgtgttcatgagcatggagaatccaggcctttggatcttgggttgccacaacagtgattttcgcaatcggggaatgactgctctcctcaaagtcagcagctgtgataagaacacaggcgactattacgaagattcttacgaggacataagtgcctacttgttgtccaagaataacgccattgagcccagatcattctcccagaatcctcccgtgcttaaaaggcatcagcgcgaaatcaccagaactactcttcagtctgatcaagaggagattgactatgacgacaccataagcgtggaaatgaagaaggaggatttcgatatctatgacgaagatgagaaccagtctccgcggagctttcagaagaagacgcgacactacttcattgcagcagtcgaaaggctttgggactacggtatgtcatcatcccctcatgtgttgcgcaatagagctcagagtggaagtgttccacagttcaagaaagtcgtctttcaagagtttacagatggcagcttcacacagcctctctatcggggcgagcttaacgaacatttgggactccttggtccctatatccgagccgaagtggaggacaacattatggttacctttaggaatcaagcctctcgcccctacagcttctactcctccctcatcagttatgaggaggatcagagacaaggcgctgaaccacggaagaactttgtgaaaccgaatgagacgaagacctacttctggaaagtacagcaccacatggcccccacaaaagacgaattcgattgcaaagcatgggcgtatttttcagacgttgacttggagaaagatgtacattcaggacttattggtcctttgttggtgtgtcacactaacactctcaatccagcccatggcaggcaggtgacagtccaggaattcgctcttttctttaccatctttgatgagaccaagtcctggtacttcacggaaaacatggagcgcaattgcagagccccctgtaacatacagatggaggaccctacctttaaggaaaattatcggttccacgcaatcaacggatacattatggatacactccctggccttgtgatggctcaggaccaacgaatcaggtggtacctcctcagcatgggttctaatgagaacatacactccattcacttttcaggacatgtgttcactgtccggaagaaagaagagtataagatggccctctacaatttgtatccaggcgtgtttgagaccgttgaaatgcttccctctaaagctggcatctggagagtagagtgcttgatcggagaacatcttcacgcaggtatgagcaccttgttcctcgtgtacagcaacaaatgtcagaccccacttggcatggccagtggacacattcgcgactttcagatcacagcatctggccagtatggacaatgggccccaaagttggctcgcctccattactccggtagcataaatgcgtggtccactaaagaacctttcagctggattaaggtcgatcttcttgcccccatgatcatccacggcattaagacacagggagcgaggcagaaattctcctccctctacatctcacagttcattattatgtatagtttggacggcaagaagtggcaaacttatagaggtaacagtactggaacatttatggtgttcttcggcaacgttgatagctctggcatcaaacacaacatctttaatcctcccataatagctcggtacatcagattgcatccgacccactacagcattaggagtacactccgaatggagcttatgggttgcgacttgaattcctgttcaatgccactcggaatggagtctaaagccatctctgatgcacagataaccgccagtagctactttacgaacatgtttgctacgtggtcaccctctaaggcaaggcttcatttgcaaggccggtctaatgcctggagacctcaggtgaacaacccgaaagaatggctccaggtggactttcagaagaccatgaaagtaacaggtgtcactactcagggagttaagtccttgctcaccagcatgtatgtgaaggagttccttatttcctcatcacaagatggccaccagtggaccctcttctttcagaatggtaaggtcaaagtgtttcagggcaatcaagacagcttcacacccgtggtgaacagtcttgatcctccactcttgacacgataccttcgaatccatccacagtcttgggttcaccagattgcattgcgcatggaagtacttggatgcgaggctcaggacctctac

SEQ ID NO: 2594 - protein, 1457 aa, synthetic construct
  REGION 1..1457: note = Variant of human B-domain deleted Factor VIII
MQIELSTCFFLCLLRFCFSATRRYYLGAVELSWDYMQSDLGELPVDARFPPRVPKSFPFNTSVVYKKTLFVEFTDHLFNIAKPRPPWMGLLGPTIQAEVYDTVVITLKNMASHPVSLHAVGVSYWKASEGAEYDDQTSQREKEDDKVFPGGSHTYVWQVLKENGPMASDPLCLTYSYLSHVDLVKDLNSGLIGALLVCREGSLAKEKTQTLHKFILLFAVFDEGKSWHSETKNSLMQDRDAASARAWPKMHTVNGYVNRSLPGLIGCHRKSVYWHVIGMGTTPEVHSIFLEGHTFLVRNHRQASLEISPITFLTAQTLLMDLGQFLLFCHISSHQHDGMEAYVKVDSCPEEPQLRMKNNEEAEDYDDDLTDSEMDVVRFDDDNSPSFIQIRSVAKKHPKTWVHYIAAEEEDWDYAPLVLAPDDRSYKSQYLNNGPQRIGRKYKKVRFMAYTDETFKTREAIQHESGILGPLLYGEVGDTLLIIFKNQASRPYNIYPHGITDVRPLYSRRLPKGVKHLKDFPILPGEIFKYKWTVTVEDGPTKSDPRCLTRYYSSFVNMERDLASGLIGPLLICYKESVDQRGNQIMSDKRNVILFSVFDENRSWYLTENIQRFLPNPAGVQLEDPEFQASNIMHSINGYVFDSLQLSVCLHEVAYWYILSIGAQTDFLSVFFSGYTFKHKMVYEDTLTLFPFSGETVFMSMENPGLWILGCHNSDFRNRGMTALLKVSSCDKNTGDYYEDSYEDISAYLLSKNNAIEPRSFSQNPPVLKRHQREITRTTLQSDQEEIDYDDTISVEMKKEDFDIYDEDENQSPRSFQKKTRHYFIAAVERLWDYGMSSSPHVLRNRAQSGSVPQFKKVVFQEFTDGSFTQPLYRGELNEHLGLLGPYIRAEVEDNIMVTFRNQASRPYSFYSSLISYEEDQRQGAEPRKNFVKPNETKTYFWKVQHHMAPTKDEFDCKAWAYFSDVDLEKDVHSGLIGPLLVCHTNTLNPAHGRQVTVQEFALFFTIFDETKSWYFTENMERNCRAPCNIQMEDPTFKENYRFHAINGYIMDTLPGLVMAQDQRIRWYLLSMGSNENIHSIHFSGHVFTVRKKEEYKMALYNLYPGVFETVEMLPSKAGIWRVECLIGEHLHAGMSTLFLVYSNKCQTPLGMASGHIRDFQITASGQYGQWAPKLARLHYSGSINAWSTKEPFSWIKVDLLAPMIIHGIKTQGARQKFSSLYISQFIIMYSLDGKKWQTYRGNSTGTFMVFFGNVDSSGIKHNIFNPPIIARYIRLHPTHYSIRSTLRMELMGCDLNSCSMPLGMESKAISDAQITASSYFTNMFATWSPSKARLHLQGRSNAWRPQVNNPKEWLQVDFQKTMKVTGVTTQGVKSLLTSMYVKEFLISSSQDGHQWTLFFQNGKVKVFQGNQDSFTPVVNSLDPPLLTRYLRIHPQSWVHQIALRMEVLGCEAQDLY

SEQ ID NO: 2595 - DNA, 4371 bp, synthetic construct
  misc_feature 1..4371: note = Variant of human B-domain deleted Factor VIII
  source 1..4371: mol_type = other DNA
atgcagattgaactgtctacctgcttcttcctctgtttgctgaggttctgctttagcgccactagacggtactaccttggcgctgtggagctgtcctgggactatatgcagagtgatttgggagagcttcccgtcgacgcacgatttcctcctcgcgttccaaagtcatttcccttcaacacaagcgtggtgtacaagaagacgctcttcgtcgaattcaccgatcacctgttcaatatcgccaaacccagaccaccatggatgggtcttttggggcctaccatacaagcggaggtgtatgacacagttgttatcactctcaagaacatggcttctcatccggtaagtcttcacgcagtgggcgtgtcctactggaaagcttcagaaggagccgagtatgatgatcagacatcccagagggagaaagaagacgacaaggtatttccaggtgggtctcatacctatgtgtggcaagtgctcaaagagaatggccctatggcaagcgatccgctctgtttgacttacagctacctttcacacgttgacctcgtcaaggacctcaactccgggttgattggagccttgttggtatgcagggaaggatctcttgccaaagagaagacacagaccctcaggaagtttatccttctctttgctgtgttcgatgagggcaaaagttggcatagcgaaacgaagaattccctcatgcaggatcgcgacgcagccagcgccagagcttggcccaagatgcacactgtgaacggatatgtcaataggtcacttcctggcttgattgggtgtcatcggaaaagtgtctactggcacgtgatcggaatggggacaacaccagaggtccactccatatttctcgaaggccataccttccttgttcgaaaccacagacaggcatccttggagatctctcccattacctttctcactgcccaaacgctccttatggacttgggtcagttccttctcttctgccatatcagctcacaccagcatgatggtatggaagcttatgtgaaagtcgacagttgtcctgaggagccacagttgcgcatgaagaataatgaagaagccgaggattacgacgacgatctcaccgattctgagatggacgtggtgaggtttgatgacgacaactctccctccttcattcaaatccggagcgtggcgaagaaacaccccaagacttgggtccactatatagcggcggaagaggaggattgggattacgctcctcttgtattggcaccagatgaccgctcatacaaaagccagtacctcaacaacggaccgcagagaattggccggaagtataagaaagtgcgatttatggcctatacagacgaaacctttaagacaagggaggccatccagcatgagagtgggattttgggacctcttctttacggcgaagttggtgataccctcctcatcatcttcaagaatcaagcttctcgcccctataacatttacccacacgggatcactgacgttaggcctttgtatagcagaagacttcccaaaggcgtgaagcatctcaaagacttccccattttgccaggcgagatctttaagtacaaatggaccgtcacagtggaagatggaccgactaaatcagaccctcgatgccttacgcggtactattcctccttcgtgaatatggagagagatttggcaagcggactcataggaccactcctcatctgttacaaggaatctgtagaccagaggggtaaccagattatgagtgataaacgcaatgtgatcctttttagcgtcttcgacgagaaccggtcctggtacttgaccgagaatatacaaaggttccttcccaaccccgcaggcgttcagttggaagaccctgagtttcaggccagcaatattatgcactcaatcaacggctatgtgtttgatagtctccagctttctgtttgcctccatgaagtagcctattggtacatcttgtcaattggtgctcaaacagacttcctctccgtcttcttctccggctacacctttaagcacaagatggtgtatgaggacactctcacactctttccattttctggagaaaccgtgttcatgagcatggagaatccaggcctttggatcttgggttgccacaacagtgattttcgcaatcggggaatgactgctctcctcaaagtcagcagctgtgataagaacacaggcgactattacgaagattcttacgaggacataagtgcctacttgttgtccaagaataacgccattgagcccagatcattctcccagaatcctcccgtgcttaaaaggcatcagcgcgaaatcaccagaactactcttcagtctgatcaagaggagattgactatgacgacaccataagcgtggaaatgaagaaggaggatttcgatatctatgacgaagatgagaaccagtctccgcggagctttcagaagaagacgcgacactacttcattgcagcagtcgaaaggctttgggactacggtatgtcatcatcccctcatgtgttgcgcaatagagctcagagtggaagtgttccacagttcaagaaagtcgtctttcaagagtttacagatggcagcttcacacagcctctctatcggggcgagcttaacgaacatttgggactccttggtccctatatccgagccgaagtggaggacaacattatggttacctttaggaatcaagcctctcgcccctacagcttctactcctccctcatcagttatgaggaggatcagagacaaggcgctgaaccacggaagaactttgtgaaaccgaatgagacgaagacctacttctggaaagtacagcaccacatggcccccacaaaagacgaattcgattgcaaagcatgggcgtatttttcagacgttgacttggagaaagatgtacattcaggacttattggtcctttgttggtgtgtcacactaacactctcaatccagcccatggcaggcaggtgacagtccaggaattcgctcttttctttaccatctttgatgagaccaagtcctggtacttcacggaaaacatggagcgcaattgcagagccccctgtaacatacagatggaggaccctacctttaaggaaaattatcggttccacgcaatcaacggatacattatggatacactccctggccttgtgatggctcaggaccaacgaatcaggtggtacctcctcagcatgggttctaatgagaacatacactccattcacttttcaggacatgtgttcactgtccggaagaaagaagagtataagatggccctctacaatttgtatccaggcgtgtttgagaccgttgaaatgcttccctctaaagctggcatctggagagtagagtgcttgatcggagaacatcttcacgcaggtatgagcaccttgttcctcgtgtacagcaacaaatgtcagaccccacttggcatggccagtggacacattcgcgactttcagatcacagcatctggccagtatggacaatgggccccaaagttggctcgcctccattactccggtagcataaatgcgtggtccactaaagaacctttcagctggattaaggtcgatcttcttgcccccatgatcatccacggcattaagacacagggagcgaggcagaaattctcctccctctacatctcacagttcattattatgtatagtttggacggcaagaagtggcaaacttatagaggtaacagtactggaacactcatggtgttcttcggcaacgttgatagctctggcatcaaacacaacatctttaatcctcccataatagctcggtacatcagattgcatccgacccactacagcattaggagtacactccgaatggagcttatgggttgcgacttgaattcctgttcaatgccactcggaatggagtctaaagccatctctgatgcacagataaccgccagtagctactttacgaacatgtttgctacgtggtcaccctctaaggcaaggcttcatttgcaaggccggtctaatgcctggagacctcaggtgaacaacccgaaagaatggctccaggtggactttcagaagaccatgaaagtaacaggtgtcactactcagggagttaagtccttgctcaccagcatgtatgtgaaggagttccttatttcctcatcacaagatggccaccagtggaccctcttctttcagaatggtaaggtcaaagtgtttcagggcaatcaagacagcttcacacccgtggtgaacagtcttgatcctccactcttgacacgataccttcgaatccatccacagtcttgggttcaccagattgcattgcgcatggaagtacttggatgcgaggctcaggacctctac

SEQ ID NO: 2596 - protein, 1457 aa, synthetic construct
  REGION 1..1457: note = Variant of human B-domain deleted Factor VIII
MQIELSTCFFLCLLRFCFSATRRYYLGAVELSWDYMQSDLGELPVDARFPPRVPKSFPFNTSVVYKKTLFVEFTDHLFNIAKPRPPWMGLLGPTIQAEVYDTVVITLKNMASHPVSLHAVGVSYWKASEGAEYDDQTSQREKEDDKVFPGGSHTYVWQVLKENGPMASDPLCLTYSYLSHVDLVKDLNSGLIGALLVCREGSLAKEKTQTLRKFILLFAVFDEGKSWHSETKNSLMQDRDAASARAWPKMHTVNGYVNRSLPGLIGCHRKSVYWHVIGMGTTPEVHSIFLEGHTFLVRNHRQASLEISPITFLTAQTLLMDLGQFLLFCHISSHQHDGMEAYVKVDSCPEEPQLRMKNNEEAEDYDDDLTDSEMDVVRFDDDNSPSFIQIRSVAKKHPKTWVHYIAAEEEDWDYAPLVLAPDDRSYKSQYLNNGPQRIGRKYKKVRFMAYTDETFKTREAIQHESGILGPLLYGEVGDTLLIIFKNQASRPYNIYPHGITDVRPLYSRRLPKGVKHLKDFPILPGEIFKYKWTVTVEDGPTKSDPRCLTRYYSSFVNMERDLASGLIGPLLICYKESVDQRGNQIMSDKRNVILFSVFDENRSWYLTENIQRFLPNPAGVQLEDPEFQASNIMHSINGYVFDSLQLSVCLHEVAYWYILSIGAQTDFLSVFFSGYTFKHKMVYEDTLTLFPFSGETVFMSMENPGLWILGCHNSDFRNRGMTALLKVSSCDKNTGDYYEDSYEDISAYLLSKNNAIEPRSFSQNPPVLKRHQREITRTTLQSDQEEIDYDDTISVEMKKEDFDIYDEDENQSPRSFQKKTRHYFIAAVERLWDYGMSSSPHVLRNRAQSGSVPQFKKVVFQEFTDGSFTQPLYRGELNEHLGLLGPYIRAEVEDNIMVTFRNQASRPYSFYSSLISYEEDQRQGAEPRKNFVKPNETKTYFWKVQHHMAPTKDEFDCKAWAYFSDVDLEKDVHSGLIGPLLVCHTNTLNPAHGRQVTVQEFALFFTIFDETKSWYFTENMERNCRAPCNIQMEDPTFKENYRFHAINGYIMDTLPGLVMAQDQRIRWYLLSMGSNENIHSIHFSGHVFTVRKKEEYKMALYNLYPGVFETVEMLPSKAGIWRVECLIGEHLHAGMSTLFLVYSNKCQTPLGMASGHIRDFQITASGQYGQWAPKLARLHYSGSINAWSTKEPFSWIKVDLLAPMIIHGIKTQGARQKFSSLYISQFIIMYSLDGKKWQTYRGNSTGTLMVFFGNVDSSGIKHNIFNPPIIARYIRLHPTHYSIRSTLRMELMGCDLNSCSMPLGMESKAISDAQITASSYFTNMFATWSPSKARLHLQGRSNAWRPQVNNPKEWLQVDFQKTMKVTGVTTQGVKSLLTSMYVKEFLISSSQDGHQWTLFFQNGKVKVFQGNQDSFTPVVNSLDPPLLTRYLRIHPQSWVHQIALRMEVLGCEAQDLY

SEQ ID NO: 2597 - DNA, 4371 bp, synthetic construct
  misc_feature 1..4371: note = Variant of human B-domain deleted Factor VIII
  source 1..4371: mol_type = other DNA
atgcagattgaactgtctacctgcttcttcctctgtttgctgaggttctgctttagcgccactagacggtactaccttggcgctgtggagctgtcctgggactatatgcagagtgatttgggagagcttcccgtcgacgcacgatttcctcctcgcgttccaaagtcatttcccttcaacacaagcgtggtgtacaagaagacgctcttcgtcgaattcaccgatcacctgttcaatatcgccaaacccagaccaccatggatgggtcttttggggcctaccatacaagcggaggtgtatgacacagttgttatcactctcaagaacatggcttctcatccggtaagtcttcacgcagtgggcgtgtcctactggaaagcttcagaaggagccgagtatgatgatcagacatcccagagggagaaagaagacgacaaggtatttccaggtgggtctcatacctatgtgtggcaagtgctcaaagagaatggccctatggcaagcgatccgctctgtttgacttacagctacctttcacacgttgacctcgtcaaggacctcaactccgggttgattggagccttgttggtatgcagggaaggatctcttgccaaagagaagacacagaccctcccgaagtttatccttctctttgctgtgttcgatgagggcaaaagttggcatagcgaaacgaagaattccctcatgcaggatcgcgacgcagccagcgccagagcttggcccaagatgcacactgtgaacggatatgtcaataggtcacttcctggcttgattgggtgtcatcggaaaagtgtctactggcacgtgatcggaatggggacaacaccagaggtccactccatatttctcgaaggccataccttccttgttcgaaaccacagacaggcatccttggagatctctcccattacctttctcactgcccaaacgctccttatggacttgggtcagttccttctcttctgccatatcagctcacaccagcatgatggtatggaagcttatgtgaaagtcgacagttgtcctgaggagccacagttgcgcatgaagaataatgaagaagccgaggattacgacgacgatctcaccgattctgagatggacgtggtgaggtttgatgacgacaactctccctccttcattcaaatccggagcgtggcgaagaaacaccccaagacttgggtccactatatagcggcggaagaggaggattgggattacgctcctcttgtattggcaccagatgaccgctcatacaaaagccagtacctcaacaacggaccgcagagaattggccggaagtataagaaagtgcgatttatggcctatacagacgaaacctttaagacaagggaggccatccagcatgagagtgggattttgggacctcttctttacggcgaagttggtgataccctcctcatcatcttcaagaatcaagcttctcgcccctataacatttacccacacgggatcactgacgttaggcctttgtatagcagaagacttcccaaaggcgtgaagcatctcaaagacttccccattttgccaggcgagatctttaagtacaaatggaccgtcacagtggaagatggaccgactaaatcagaccctcgatgccttacgcggtactattcctccttcgtgaatatggagagagatttggcaagcggactcataggaccactcctcatctgttacaaggaatctgtagaccagaggggtaaccagattatgagtgataaacgcaatgtgatcctttttagcgtcttcgacgagaaccggtcctggtacttgaccgagaatatacaaaggttccttcccaaccccgcaggcgttcagttggaagaccctgagtttcaggccagcaatattatgcactcaatcaacggctatgtgtttgatagtctccagctttctgtttgcctccatgaagtagcctattggtacatcttgtcaattggtgctcaaacagacttcctctccgtcttcttctccggctacacctttaagcacaagatggtgtatgaggacactctcacactctttccattttctggagaaaccgtgttcatgagcatggagaatccaggcctttggatcttgggttgccacaacagtgattttcgcaatcggggaatgactgctctcctcaaagtcagcagctgtgataagaacacaggcgactattacgaagattcttacgaggacataagtgcctacttgttgtccaagaataacgccattgagcccagatcattctcccagaatcctcccgtgcttaaaaggcatcagcgcgaaatcaccagaactactcttcagtctgatcaagaggagattgactatgacgacaccataagcgtggaaatgaagaaggaggatttcgatatctatgacgaagatgagaaccagtctccgcggagctttcagaagaagacgcgacactacttcattgcagcagtcgaaaggctttgggactacggtatgtcatcatcccctcatgtgttgcgcaatagagctcagagtggaagtgttccacagttcaagaaagtcgtctttcaagagtttacagatggcagcttcacacagcctctctatcggggcgagcttaacgaacatttgggactccttggtccctatatccgagccgaagtggaggacaacattatggttacctttaggaatcaagcctctcgcccctacagcttctactcctccctcatcagttatgaggaggatcagagacaaggcgctgaaccacggaagaactttgtgaaaccgaatgagacgaagacctacttctggaaagtacagcaccacatggcccccacaaaagacgaattcgattgcaaagcatgggcgtatttttcagacgttgacttggagaaagatgtacattcaggacttattggtcctttgttggtgtgtcacactaacactctcaatccagcccatggcaggcaggtgacagtccaggaattcgctcttttctttaccatctttgatgagaccaagtcctggtacttcacggaaaacatggagcgcaattgcagagccccctgtaacatacagatggaggaccctacctttaaggaaaattatcggttccacgcaatcaacggatacattatggatacactccctggccttgtgatggctcaggaccaacgaatcaggtggtacctcctcagcatgggttctaatgagaacatacactccattcacttttcaggacatgtgttcactgtccggaagaaagaagagtataagatggccctctacaatttgtatccaggcgtgtttgagaccgttgaaatgcttccctctaaagctggcatctggagagtagagtgcttgatcggagaacatcttcacgcaggtatgagcaccttgttcctcgtgtacagcaacaaatgtcagaccccacttggcatggccagtggacacattcgcgactttcagatcacagcatctggccagtatggacaatgggccccaaagttggctcgcctccattactccggtagcataaatgcgtggtccactaaagaacctttcagctggattaaggtcgatcttcttgcccccatgatcatccacggcattaagacacagggagcgaggcagaaattctcctccctctacatctcacagttcattattatgtatagtttggacggcaagaagtggcaaacttatagaggtaacagtactggaacactcatggtgttcttcggcaacgttgatagctctggcatcaaacacaacatctttaatcctcccataatagctcggtacatcagattgcatccgacccactacagcattaggagtacactccgaatggagcttatgggttgcgacttgaattcctgttcaatgccactcggaatggagtctaaagccatctctgatgcacagataaccgccagtagctactttacgaacatgtttgctacgtggtcaccctctaaggcaaggcttcatttgcaaggccggtctaatgcctggagacctcaggtgaacaacccgaaagaatggctccaggtggactttcagaagaccatgaaagtaacaggtgtcactactcagggagttaagtccttgctcaccagcatgtatgtgaaggagttccttatttcctcatcacaagatggccaccagtggaccctcttctttcagaatggtaaggtcaaagtgtttcagggcaatcaagacagcttcacacccgtggtgaacagtcttgatcctccactcttgacacgataccttcgaatccatccacagtcttgggttcaccagattgcattgcgcatggaagtacttggatgcgaggctcaggacctctac

SEQ ID NO: 2598 - protein, 1457 aa, synthetic construct
  REGION 1..1457: note = Variant of human B-domain deleted Factor VIII
MQIELSTCFFLCLLRFCFSATRRYYLGAVELSWDYMQSDLGELPVDARFPPRVPKSFPFNTSVVYKKTLFVEFTDHLFNIAKPRPPWMGLLGPTIQAEVYDTVVITLKNMASHPVSLHAVGVSYWKASEGAEYDDQTSQREKEDDKVFPGGSHTYVWQVLKENGPMASDPLCLTYSYLSHVDLVKDLNSGLIGALLVCREGSLAKEKTQTLPKFILLFAVFDEGKSWHSETKNSLMQDRDAASARAWPKMHTVNGYVNRSLPGLIGCHRKSVYWHVIGMGTTPEVHSIFLEGHTFLVRNHRQASLEISPITFLTAQTLLMDLGQFLLFCHISSHQHDGMEAYVKVDSCPEEPQLRMKNNEEAEDYDDDLTDSEMDVVRFDDDNSPSFIQIRSVAKKHPKTWVHYIAAEEEDWDYAPLVLAPDDRSYKSQYLNNGPQRIGRKYKKVRFMAYTDETFKTREAIQHESGILGPLLYGEVGDTLLIIFKNQASRPYNIYPHGITDVRPLYSRRLPKGVKHLKDFPILPGEIFKYKWTVTVEDGPTKSDPRCLTRYYSSFVNMERDLASGLIGPLLICYKESVDQRGNQIMSDKRNVILFSVFDENRSWYLTENIQRFLPNPAGVQLEDPEFQASNIMHSINGYVFDSLQLSVCLHEVAYWYILSIGAQTDFLSVFFSGYTFKHKMVYEDTLTLFPFSGETVFMSMENPGLWILGCHNSDFRNRGMTALLKVSSCDKNTGDYYEDSYEDISAYLLSKNNAIEPRSFSQNPPVLKRHQREITRTTLQSDQEEIDYDDTISVEMKKEDFDIYDEDENQSPRSFQKKTRHYFIAAVERLWDYGMSSSPHVLRNRAQSGSVPQFKKVVFQEFTDGSFTQPLYRGELNEHLGLLGPYIRAEVEDNIMVTFRNQASRPYSFYSSLISYEEDQRQGAEPRKNFVKPNETKTYFWKVQHHMAPTKDEFDCKAWAYFSDVDLEKDVHSGLIGPLLVCHTNTLNPAHGRQVTVQEFALFFTIFDETKSWYFTENMERNCRAPCNIQMEDPTFKENYRFHAINGYIMDTLPGLVMAQDQRIRWYLLSMGSNENIHSIHFSGHVFTVRKKEEYKMALYNLYPGVFETVEMLPSKAGIWRVECLIGEHLHAGMSTLFLVYSNKCQTPLGMASGHIRDFQITASGQYGQWAPKLARLHYSGSINAWSTKEPFSWIKVDLLAPMIIHGIKTQGARQKFSSLYISQFIIMYSLDGKKWQTYRGNSTGTLMVFFGNVDSSGIKHNIFNPPIIARYIRLHPTHYSIRSTLRMELMGCDLNSCSMPLGMESKAISDAQITASSYFTNMFATWSPSKARLHLQGRSNAWRPQVNNPKEWLQVDFQKTMKVTGVTTQGVKSLLTSMYVKEFLISSSQDGHQWTLFFQNGKVKVFQGNQDSFTPVVNSLDPPLLTRYLRIHPQSWVHQIALRMEVLGCEAQDLY

SEQ ID NO: 2599 - DNA, 4371 bp, synthetic construct
  misc_feature 1..4371: note = Variant of human B-domain deleted Factor VIII
  source 1..4371: mol_type = other DNA
atgcagattgaactgtctacctgcttcttcctctgtttgctgaggttctgctttagcgccactagacggtactaccttggcgctgtggagctgtcctgggactatatgcagagtgatttgggagagcttcccgtcgacgcacgatttcctcctcgcgttccaaagtcatttcccttcaacacaagcgtggtgtacaagaagacgctcttcgtcgaattcaccgatcacctgttcaatatcgccaaacccagaccaccatggatgggtcttttggggcctaccatacaagcggaggtgtatgacacagttgttatcactctcaagaacatggcttctcatccggtaagtcttcacgcagtgggcgtgtcctactggaaagcttcagaaggagccgagtatgatgatcagacatcccagagggagaaagaagacgacaaggtatttccaggtgggtctcatacctatgtgtggcaagtgctcaaagagaatggccctatggcaagcgatccgctctgtttgacttacagctacctttcacacgttgacctcgtcaaggacctcaactccgggttgattggagccttgttggtatgcagggaaggatctcttgccaaagagaagacacagaccctccacaagtttatccttctctttgctgtgttcgatgagggcaaaagttggcatagcgaaacgaagaattccctcatgcaggatcgcgacgcagccagcgccagagcttggcccaagatgcacactgtgaacggatatgtcaataggtcacttcctggcttgattgggtgtcatcggaaaagtgtctactggcacgtgatcggaatggggacaacaccagaggtccactccatatttctcgaaggccataccttccttgttcgaaaccacagacaggcatccttggagatctctcccattacctttctcactgcccaaacgctccttatggacttgggtcagttccttctcttctgccatatcagctcacaccagcatgatggtatggaagcttatgtgaaagtcgacagttgtcctgaggagccacagttgcgcatgaagaataatgaagaagccgaggattacgacgacgatctcaccgattctgagatggacgtggtgaggtttgatgacgacaactctccctccttcattcaaatccggagcgtggcgaagaaacaccccaagacttgggtccactatatagcggcggaagaggaggattgggattacgctcctcttgtattggcaccagatgaccgctcatacaaaagccagtacctcaacaacggaccgcagagaattggccggaagtataagaaagtgcgatttatggcctatacagacgaaacctttaagacaagggaggccatccagcatgagagtgggattttgggacctcttctttacggcgaagttggtgataccctcctcatcatcttcaagaatcaagcttctcgcccctataacatttacccacacgggatcactgacgttaggcctttgtatagcagaagacttcccaaaggcgtgaagcatctcaaagacttccccattttgccaggcgagatctttaagtacaaatggaccgtcacagtggaagatggaccgactaaatcagaccctcgatgccttacgcggtactattcctccttcgtgaatatggagagagatttggcaagcggactcataggaccactcctcatctgttacaaggaatctgtagaccagaggggtaaccagattatgagtgataaacgcaatgtgatcctttttagcgtcttcgacgagaaccggtcctggtacttgaccgagaatatacaaaggttccttcccaaccccgcaggcgttcagttggaagaccctgagtttcaggccagcaatattatgcactcaatcaacggctatgtgtttgatagtctccagctttctgtttgcctccatgaagtagcctattggtacatcttgtcaattggtgctcaaacagacttcctctccgtcttcttctccggctacacctttaagcacaagaatgtgtatgaggacactctcacactctttccattttctggagaaaccgtgttcatgagcatggagaatccaggcctttggatcttgggttgccacaacagtgattttcgcaatcggggaatgactgctctcctcaaagtcagcagctgtgataagaacacaggcgactattacgaagattcttacgaggacataagtgcctacttgttgtccaagaataacgccattgagcccagatcattctcccagaatcctcccgtgcttaaaaggcatcagcgcgaaatcaccagaactactcttcagtctgatcaagaggagattgactatgacgacaccataagcgtggaaatgaagaaggaggatttcgatatctatgacgaagatgagaaccagtctccgcggagctttcagaagaagacgcgacactacttcattgcagcagtcgaaaggctttgggactacggtatgtcatcatcccctcatgtgttgcgcaatagagctcagagtggaagtgttccacagttcaagaaagtcgtctttcaagagtttacagatggcagcttcacacagcctctctatcggggcgagcttaacgaacatttgggactccttggtccctatatccgagccgaagtggaggacaacattatggttacctttaggaatcaagcctctcgcccctacagcttctactcctccctcatcagttatgaggaggatcagagacaaggcgctgaaccacggaagaactttgtgaaaccgaatgagacgaagacctacttctggaaagtacagcaccacatggcccccacaaaagacgaattcgattgcaaagcatgggcgtatttttcagacgttgacttggagaaagatgtacattcaggacttattggtcctttgttggtgtgtcacactaacactctcaatccagcccatggcaggcaggtgacagtccaggaattcgctcttttctttaccatctttgatgagaccaagtcctggtacttcacggaaaacatggagcgcaattgcagagccccctgtaacatacagatggaggaccctacctttaaggaaaattatcggttccacgcaatcaacggatacattatggatacactccctggccttgtgatggctcaggaccaacgaatcaggtggtacctcctcagcatgggttctaatgagaacatacactccattcacttttcaggacatgtgttcactgtccggaagaaagaagagtataagatggccctctacaatttgtatccaggcgtgtttgagaccgttgaaatgcttccctctaaagctggcatctggagagtagagtgcttgatcggagaacatcttcacgcaggtatgagcaccttgttcctcgtgtacagcaacaaatgtcagaccccacttggcatggccagtggacacattcgcgactttcagatcacagcatctggccagtatggacaatgggccccaaagttggctcgcctacattactccggtagcataaatgcgtggtccactaaagaacctttcagctggattaaggtcgatcttcttgcccccatgatcatccacggcattaagacacagggagcgaggcagaaattctcctccctctacatctcacagttcattattatgtatagtttggacggcaagaagtggcaaacttatagaggtaacagtactggaacactcatggtgttcttcggcaacgttgatagctctggcatcaaacacaacatctttaatcctcccataatagctcggtacatcagattgcatccgacccactacagcattaggagtacactccgaatggagcttatgggttgcgacttgaattcctgttcaatgccactcggaatggagtctaaagccatctctgatgcacagataaccgccagtagctactttacgaacatgtttgctacgtggtcaccctctaaggcaaggcttcatttgcaaggccggtctaatgcctggagacctcaggtgaacaacccgaaagaatggctccaggtggactttcagaagaccatgaaagtaacaggtgtcactactcagggagttaagtccttgctcaccagcatgtatgtgaaggagttccttatttcctcatcacaagatggccaccagtggaccctcttctttcagaatggtaaggtcaaagtgtttcagggcaatcaagacagcttcacacccgtggtgaacagtcttgatcctccactcttgacacgataccttcgaatccatccacagtcttgggttcaccagattgcattgcgcatggaagtacttggatgcgaggctcaggacctctac

SEQ ID NO: 2600 - protein, 1457 aa, synthetic construct
  REGION 1..1457: note = Variant of human B-domain deleted Factor VIII
MQIELSTCFFLCLLRFCFSATRRYYLGAVELSWDYMQSDLGELPVDARFPPRVPKSFPFNTSVVYKKTLFVEFTDHLFNIAKPRPPWMGLLGPTIQAEVYDTVVITLKNMASHPVSLHAVGVSYWKASEGAEYDDQTSQREKEDDKVFPGGSHTYVWQVLKENGPMASDPLCLTYSYLSHVDLVKDLNSGLIGALLVCREGSLAKEKTQTLHKFILLFAVFDEGKSWHSETKNSLMQDRDAASARAWPKMHTVNGYVNRSLPGLIGCHRKSVYWHVIGMGTTPEVHSIFLEGHTFLVRNHRQASLEISPITFLTAQTLLMDLGQFLLFCHISSHQHDGMEAYVKVDSCPEEPQLRMKNNEEAEDYDDDLTDSEMDVVRFDDDNSPSFIQIRSVAKKHPKTWVHYIAAEEEDWDYAPLVLAPDDRSYKSQYLNNGPQRIGRKYKKVRFMAYTDETFKTREAIQHESGILGPLLYGEVGDTLLIIFKNQASRPYNIYPHGITDVRPLYSRRLPKGVKHLKDFPILPGEIFKYKWTVTVEDGPTKSDPRCLTRYYSSFVNMERDLASGLIGPLLICYKESVDQRGNQIMSDKRNVILFSVFDENRSWYLTENIQRFLPNPAGVQLEDPEFQASNIMHSINGYVFDSLQLSVCLHEVAYWYILSIGAQTDFLSVFFSGYTFKHKNVYEDTLTLFPFSGETVFMSMENPGLWILGCHNSDFRNRGMTALLKVSSCDKNTGDYYEDSYEDISAYLLSKNNAIEPRSFSQNPPVLKRHQREITRTTLQSDQEEIDYDDTISVEMKKEDFDIYDEDENQSPRSFQKKTRHYFIAAVERLWDYGMSSSPHVLRNRAQSGSVPQFKKVVFQEFTDGSFTQPLYRGELNEHLGLLGPYIRAEVEDNIMVTFRNQASRPYSFYSSLISYEEDQRQGAEPRKNFVKPNETKTYFWKVQHHMAPTKDEFDCKAWAYFSDVDLEKDVHSGLIGPLLVCHTNTLNPAHGRQVTVQEFALFFTIFDETKSWYFTENMERNCRAPCNIQMEDPTFKENYRFHAINGYIMDTLPGLVMAQDQRIRWYLLSMGSNENIHSIHFSGHVFTVRKKEEYKMALYNLYPGVFETVEMLPSKAGIWRVECLIGEHLHAGMSTLFLVYSNKCQTPLGMASGHIRDFQITASGQYGQWAPKLARLHYSGSINAWSTKEPFSWIKVDLLAPMIIHGIKTQGARQKFSSLYISQFIIMYSLDGKKWQTYRGNSTGTLMVFFGNVDSSGIKHNIFNPPIIARYIRLHPTHYSIRSTLRMELMGCDLNSCSMPLGMESKAISDAQITASSYFTNMFATWSPSKARLHLQGRSNAWRPQVNNPKEWLQVDFQKTMKVTGVTTQGVKSLLTSMYVKEFLISSSQDGHQWTLFFQNGKVKVFQGNQDSFTPVVNSLDPPLLTRYLRIHPQSWVHQIALRMEVLGCEAQDLY

SEQ ID NO: 2601 - DNA, 4371 bp, synthetic construct
  misc_feature 1..4371: note = Variant of human B-domain deleted Factor VIII
  source 1..4371: mol_type = other DNA
atgcagattgaactgtctacctgcttcttcctctgtttgctgaggttctgctttagcgccactagacggtactaccttggcgctgtggagctgtcctgggactatatgcagagtgatttgggagagcttcccgtcgacgcacgatttcctcctcgcgttccaaagtcatttcccttcaacacaagcgtggtgtacaagaagacgctcttcgtcgaattcaccgatcacctgttcaatatcgccaaacccagaccaccatggatgggtcttttggggcctaccatacaagcggaggtgtatgacacagttgttatcactctcaagaacatggcttctcatccggtaagtcttcacgcagtgggcgtgtcctactggaaagcttcagaaggagccgagtatgatgatcagacatcccagagggagaaagaagacgacaaggtatttccaggtgggtctcatacctatgtgtggcaagtgctcaaagagaatggccctatggcaagcgatccgctctgtttgacttacagctacctttcacacgttgacctcgtcaaggacctcaactccgggttgattggagccttgttggtatgcagggaaggatctcttgccaaagagaagacacagaccctccacaagtttatccttctctttgctgtgttcgatgagggcaaaagttggcatagcgaaacgaagaattccctcatgcaggatcgcgacgcagccagcgccagagcttggcccaagatgcacactgtgaacggatatgtcaataggtcacttcctggcttgattgggtgtcatcggaaaagtgtctactggcacgtgatcggaatggggacaacaccagaggtccactccatatttctcgaaggccataccttccttgttcgaaaccacagacaggcatccttggagatctctcccattacctttctcactgcccaaacgctccttatggacttgggtcagttccttctcttctgccatatcagctcacaccagcatgatggtatggaagcttatgtgaaagtcgacagttgtcctgaggagccacagttgcgcatgaagaataatgaagaagccgaggattacgacgacgatctcaccgattctgagatggacgtggtgaggtttgatgacgacaactctccctccttcattcaaatccggagcgtggcgaagaaacaccccaagacttgggtccactatatagcggcggaagaggaggattgggattacgctcctcttgtattggcaccagatgaccgctcatacaaaagccagtacctcaacaacggaccgcagagaattggccggaagtataagaaagtgcgatttatggcctatacagacgaaacctttaagacaagggaggccatccagcatgagagtgggattttgggacctcttctttacggcgaagttggtgataccctcctcatcatcttcaagaatcaagcttctcgcccctataacatttacccacacgggatcactgacgttaggcctttgtatagcagaagacttcccaaaggcgtgaagcatctcaaagacttccccattttgccaggcgagatctttaagtacaaatggaccgtcacagtggaagatggaccgactaaatcagaccctcgatgccttacgcggtactattcctccttcgtgaatatggagagagatttggcaagcggactcataggaccactcctcatctgttacaaggaatctgtagaccagaggggtaaccagattatgagtgataaacgcaatgtgatcctttttagcgtcttcgacgagaaccggtcctggtacttgaccgagaatatacaaaggttccttcccaaccccgcaggcgttcagttggaagaccctgagtttcaggccagcaatattatgcactcaatcaacggctatgtgtttgatagtctccagctttctgtttgcctccatgaagtagcctattggtacatcttgtcaattggtgctcaaacagacttcctctccgtcttcttctccggctacacctttaagcacaagatggtgtatgaggacactctcacactctttccattttctggagaaaccgtgttcatgagcatggagaatccaggcctttggatcttgggttgccacaacagtgattttcgcaatcggggaatgactgctctcctcaaagtcagcagctgtgataagaacacaggcgactattacgaagattcttacgaggacataagtgcctacacgttgtccaagaataacgccattgagcccagatcattctcccagaatcctcccgtgcttaaaaggcatcagcgcgaaatcaccagaactactcttcagtctgatcaagaggagattgactatgacgacaccataagcgtggaaatgaagaaggaggatttcgatatctatgacgaagatgagaaccagtctccgcggagctttcagaagaagacgcgacactacttcattgcagcagtcgaaaggctttgggactacggtatgtcatcatcccctcatgtgttgcgcaatagagctcagagtggaagtgttccacagttcaagaaagtcgtctttcaagagtttacagatggcagcttcacacagcctctctatcggggcgagcttaacgaacatttgggactccttggtccctatatccgagccgaagtggaggacaacattatggttacctttaggaatcaagcctctcgcccctacagcttctactcctccctcatcagttatgaggaggatcagagacaaggcgctgaaccacggaagaactttgtgaaaccgaatgagacgaagacctacttctggaaagtacagcaccacatggcccccacaaaagacgaattcgattgcaaagcatgggcgtatttttcagacgttgacttggagaaagatgtacattcaggacttattggtcctttgttggtgtgtcacactaacactctcaatccagcccatggcaggcaggtgacagtccaggaattcgctcttttctttaccatctttgatgagaccaagtcctggtacttcacggaaaacatggagcgcaattgcagagccccctgtaacatacagatggaggaccctacctttaaggaaaattatcggttccacgcaatcaacggatacattatggatacactccctggccttgtgatggctcaggaccaacgaatcaggtggtacctcctcagcatgggttctaatgagaacatacactccattcacttttcaggacatgtgttcactgtccggaagaaagaagagtataagatggccctctacaatttgtatccaggcgtgtttgagaccgttgaaatgcttccctctaaagctggcatctggagagtagagtgcttgatcggagaacatcttcacgcaggtatgagcaccttgttcctcgtgtacagcaacaaatgtcagaccccacttggcatggccagtggacacattcgcgactttcagatcacagcatctggccagtatggacaatgggccccaaagttggctcgcctccattactccggtagcataaatgcgtggtccactaaagaacctttcagctggattaaggtcgatcttcttgcccccatgatcatccacggcattaagacacagggagcgaggcagaaattctcctccctctacatctcacagttcattattatgtatagtttggacggcaagaagtggcaaacttatagaggtaacagtactggaacactcatggtgttcttcggcaacgttgatagctctggcatcaaacacaacatctttaatcctcccataatagctcggtacatcagattgcatccgacccactacagcattaggagtacactccgaatggagcttatgggttgcgacttgaattcctgttcaatgccactcggaatggagtctaaagccatctctgatgcacagataaccgccagtagctactttacgaacatgtttgctacgtggtcaccctctaaggcaaggcttcatttgcaaggccggtctaatgcctggagacctcaggtgaacaacccgaaagaatggctccaggtggactttcagaagaccatgaaagtaacaggtgtcactactcagggagttaagtccttgctcaccagcatgtatgtgaaggagttccttatttcctcatcacaagatggccaccagtggaccctcttctttcagaatggtaaggtcaaagtgtttcagggcaatcaagacagcttcacacccgtggtgaacagtcttgatcctccactcttgacacgataccttcgaatccatccacagtcttgggttcaccagattgcattgcgcatggaagtacttggatgcgaggctcaggacctctac

SEQ ID NO: 2602 - protein, 1457 aa, synthetic construct
  REGION 1..1457: note = Variant of human B-domain deleted Factor VIII
MQIELSTCFFLCLLRFCFSATRRYYLGAVELSWDYMQSDLGELPVDARFPPRVPKSFPFNTSVVYKKTLFVEFTDHLFNIAKPRPPWMGLLGPTIQAEVYDTVVITLKNMASHPVSLHAVGVSYWKASEGAEYDDQTSQREKEDDKVFPGGSHTYVWQVLKENGPMASDPLCLTYSYLSHVDLVKDLNSGLIGALLVCREGSLAKEKTQTLHKFILLFAVFDEGKSWHSETKNSLMQDRDAASARAWPKMHTVNGYVNRSLPGLIGCHRKSVYWHVIGMGTTPEVHSIFLEGHTFLVRNHRQASLEISPITFLTAQTLLMDLGQFLLFCHISSHQHDGMEAYVKVDSCPEEPQLRMKNNEEAEDYDDDLTDSEMDVVRFDDDNSPSFIQIRSVAKKHPKTWVHYIAAEEEDWDYAPLVLAPDDRSYKSQYLNNGPQRIGRKYKKVRFMAYTDETFKTREAIQHESGILGPLLYGEVGDTLLIIFKNQASRPYNIYPHGITDVRPLYSRRLPKGVKHLKDFPILPGEIFKYKWTVTVEDGPTKSDPRCLTRYYSSFVNMERDLASGLIGPLLICYKESVDQRGNQIMSDKRNVILFSVFDENRSWYLTENIQRFLPNPAGVQLEDPEFQASNIMHSINGYVFDSLQLSVCLHEVAYWYILSIGAQTDFLSVFFSGYTFKHKMVYEDTLTLFPFSGETVFMSMENPGLWILGCHNSDFRNRGMTALLKVSSCDKNTGDYYEDSYEDISAYTLSKNNAIEPRSFSQNPPVLKRHQREITRTTLQSDQEEIDYDDTISVEMKKEDFDIYDEDENQSPRSFQKKTRHYFIAAVERLWDYGMSSSPHVLRNRAQSGSVPQFKKVVFQEFTDGSFTQPLYRGELNEHLGLLGPYIRAEVEDNIMVTFRNQASRPYSFYSSLISYEEDQRQGAEPRKNFVKPNETKTYFWKVQHHMAPTKDEFDCKAWAYFSDVDLEKDVHSGLIGPLLVCHTNTLNPAHGRQVTVQEFALFFTIFDETKSWYFTENMERNCRAPCNIQMEDPTFKENYRFHAINGYIMDTLPGLVMAQDQRIRWYLLSMGSNENIHSIHFSGHVFTVRKKEEYKMALYNLYPGVFETVEMLPSKAGIWRVECLIGEHLHAGMSTLFLVYSNKCQTPLGMASGHIRDFQITASGQYGQWAPKLARLHYSGSINAWSTKEPFSWIKVDLLAPMIIHGIKTQGARQKFSSLYISQFIIMYSLDGKKWQTYRGNSTGTLMVFFGNVDSSGIKHNIFNPPIIARYIRLHPTHYSIRSTLRMELMGCDLNSCSMPLGMESKAISDAQITASSYFTNMFATWSPSKARLHLQGRSNAWRPQVNNPKEWLQVDFQKTMKVTGVTTQGVKSLLTSMYVKEFLISSSQDGHQWTLFFQNGKVKVFQGNQDSFTPVVNSLDPPLLTRYLRIHPQSWVHQIALRMEVLGCEAQDLY

SEQ ID NO: 2603 - DNA, 4371 bp, synthetic construct
  misc_feature 1..4371: note = Variant of human B-domain deleted Factor VIII
  source 1..4371: mol_type = other DNA
atgcagattgaactgtctacctgcttcttcctctgtttgctgaggttctgctttagcgccactagacggtactaccttggcgctgtggagctgtcctgggactatatgcagagtgatttgggagagcttcccgtcgacgcacgatttcctcctcgcgttccaaagtcatttcccttcaacacaagcgtggtgtacaagaagacgctcttcgtcgaattcaccgatcacctgttcaatatcgccaaacccagaccaccatggatgggtcttttggggcctaccatacaagcggaggtgtatgacacagttgttatcactctcaagaacatggcttctcatccggtaagtcttcacgcagtgggcgtgtcctactggaaagcttcagaaggagccgagtatgatgatcagacatcccagagggagaaagaagacgacaaggtatttccaggtgggtctcatacctatgtgtggcaagtgctcaaagagaatggccctatggcaagcgatccgaattgtttgacttacagctacctttcacacgttgacctcgtcaaggacctcaactccgggttgattggagccttgttggtatgcagggaaggatctcttgccaaagagaagacacagaccctccacaagtttatccttctctttgctgtgttcgatgagggcaaaagttggcatagcgaaacgaagaattccctcatgcaggatcgcgacgcagccagcgccagagcttggcccaagatgcacactgtgaacggatatgtcaataggtcacttcctggcttgattgggtgtcatcggaaaagtgtctactggcacgtgatcggaatggggacaacaccagaggtccactccatatttctcgaaggccataccttccttgttcgaaaccacagacaggcatccttggagatctctcccattacctttctcactgcccaaacgctccttatggacttgggtcagttccttctcttctgccatatcagctcacaccagcatgatggtatggaagcttatgtgaaagtcgacagttgtcctgaggagccacagttgcgcatgaagaataatgaagaagccgaggattacgacgacgatctcaccgattctgagatggacgtggtgaggtttgatgacgacaactctccctccttcattcaaatccggagcgtggcgaagaaacaccccaagacttgggtccactatatagcggcggaagaggaggattgggattacgctcctcttgtattggcaccagatgaccgctcatacaaaagccagtacctcaacaacggaccgcagagaattggccggaagtataagaaagtgcgatttatggcctatacagacgaaacctttaagacaagggaggccatccagcatgagagtgggattttgggacctcttctttacggcgaagttggtgataccctcctcatcatcttcaagaatcaagcttctcgcccctataacatttacccacacgggatcactgacgttaggcctttgtatagcagaagacttcccaaaggcgtgaagcatctcaaagacttccccattttgccaggcgagatctttaagtacaaatggaccgtcacagtggaagatggaccgactaaatcagaccctcgatgccttacgcggtactattcctccttcgtgaatatggagagagatttggcaagcggactcataggaccactcctcatctgttacaaggaatctgtagaccagaggggtaaccagattatgagtgataaacgcaatgtgatcctttttagcgtcttcgacgagaaccggtcctggtacttgaccgagaatatacaaaggttccttcccaaccccgcaggcgttcagttggaagaccctgagtttcaggccagcaatattatgcactcaatcaacggctatgtgtttgatagtctccagctttctgtttgcctccatgaagtagcctattggtacatcttgtcaattggtgctcaaacagacttcctctccgtcttcttctccggctacacctttaagcacaagatggtgtatgaggacactctcacactctttccattttctggagaaaccgtgttcatgagcatggagaatccaggcctttggatcttgggttgccacaacagtgattttcgcaatcggggaatgactgctctcctcaaagtcagcagctgtgataagaacacaggcgactattacgaagattcttacgaggacataagtgcctacttgttgtccaagaataacgccattgagcccagatcattctcccagaatcctcccgtgcttaaaaggcatcagcgcgaaatcaccagaactactcttcagtctgatcaagaggagattgactatgacgacaccataagcgtggaaatgaagaaggaggatttcgatatctatgacgaagatgagaaccagtctccgcggagctttcagaagaagacgcgacactacttcattgcagcagtcgaaaggctttgggactacggtatgtcatcatcccctcatgtgttgcgcaatagagctcagagtggaagtgttccacagttcaagaaagtcgtctttcaagagtttacagatggcagcttcacacagcctctctatcggggcgagcttaacgaacatttgggactccttggtccctatatccgagccgaagtggaggacaacattatggttacctttaggaatcaagcctctcgcccctacagcttctactcctccctcatcagttatgaggaggatcagagacaaggcgctgaaccacggaagaactttgtgaaaccgaatgagacgaagacctacttctggaaagtacagcaccacatggcccccacaaaagacgaattcgattgcaaagcatgggcgtatttttcagacgttgacttggagaaagatgtacattcaggacttattggtcctttgttggtgtgtcacactaacactctcaatccagcccatggcaggcaggtgacagtccaggaattcgctcttttctttaccatctttgatgagaccaagtcctggtacttcacggaaaacatggagcgcaattgcagagccccctgtaacatacagatggaggaccctacctttaaggaaaattatcggttccacgcaatcaacggatacattatggatacactccctggccttgtgatggctcaggaccaacgaatcaggtggtacctcctcagcatgggttctaatgagaacatacactccattcacttttcaggacatgtgttcactgtccggaagaaagaagagtataagatggccctctacaatttgtatccaggcgtgtttgagaccgttgaaatgcttccctctaaagctggcatctggagagtagagtgcttgatcggagaacatcttcacgcaggtatgagcaccttgttcctcgtgtacagcaacaaatgtcagaccccacttggcatggccagtggacacattcgcgactttcagatcacagcatctggccagtatggacaatgggccccaaagttggctcgcctccattactccggtagcataaatgcgtggtccactaaagaacctttcagctggattaaggtcgatcttcttgcccccatgatcatccacggcattaagacacagggagcgaggcagaaattctcctccctctacatctcacagttcattattatgtatagtttggacggcaagaagtggcaaacttatagaggtaacagtactggaacactcatggtgttcttcggcaacgttgatagctctggcatcaaacacaacatctttaatcctcccataatagctcggtacatcagattgcatccgacccactacagcattaggagtacactccgaatggagcttatgggttgcgacttgaattcctgttcaatgccactcggaatggagtctaaagccatctctgatgcacagataaccgccagtagctactttacgaacatgtttgctacgtggtcaccctctaaggcaaggcttcatttgcaaggccggtctaatgcctggagacctcaggtgaacaacccgaaagaatggctccaggtggactttcagaagaccatgaaagtaacaggtgtcactactcagggagttaagtccttgctcaccagcatgtatgtgaaggagttccttatttcctcatcacaagatggccaccagtggaccctcttctttcagaatggtaaggtcaaagtgtttcagggcaatcaagacagcttcacacccgtggtgaacagtcttgatcctccactcttgacacgataccttcgaatccatccacagtcttgggttcaccagattgcattgcgcatggaagtacttggatgcgaggctcaggacctctac

SEQ ID NO: 2604 - protein, 1457 aa, synthetic construct
  REGION 1..1457: note = Variant of human B-domain deleted Factor VIII
MQIELSTCFFLCLLRFCFSATRRYYLGAVELSWDYMQSDLGELPVDARFPPRVPKSFPFNTSVVYKKTLFVEFTDHLFNIAKPRPPWMGLLGPTIQAEVYDTVVITLKNMASHPVSLHAVGVSYWKASEGAEYDDQTSQREKEDDKVFPGGSHTYVWQVLKENGPMASDPNCLTYSYLSHVDLVKDLNSGLIGALLVCREGSLAKEKTQTLHKFILLFAVFDEGKSWHSETKNSLMQDRDAASARAWPKMHTVNGYVNRSLPGLIGCHRKSVYWHVIGMGTTPEVHSIFLEGHTFLVRNHRQASLEISPITFLTAQTLLMDLGQFLLFCHISSHQHDGMEAYVKVDSCPEEPQLRMKNNEEAEDYDDDLTDSEMDVVRFDDDNSPSFIQIRSVAKKHPKTWVHYIAAEEEDWDYAPLVLAPDDRSYKSQYLNNGPQRIGRKYKKVRFMAYTDETFKTREAIQHESGILGPLLYGEVGDTLLIIFKNQASRPYNIYPHGITDVRPLYSRRLPKGVKHLKDFPILPGEIFKYKWTVTVEDGPTKSDPRCLTRYYSSFVNMERDLASGLIGPLLICYKESVDQRGNQIMSDKRNVILFSVFDENRSWYLTENIQRFLPNPAGVQLEDPEFQASNIMHSINGYVFDSLQLSVCLHEVAYWYILSIGAQTDFLSVFFSGYTFKHKMVYEDTLTLFPFSGETVFMSMENPGLWILGCHNSDFRNRGMTALLKVSSCDKNTGDYYEDSYEDISAYLLSKNNAIEPRSFSQNPPVLKRHQREITRTTLQSDQEEIDYDDTISVEMKKEDFDIYDEDENQSPRSFQKKTRHYFIAAVERLWDYGMSSSPHVLRNRAQSGSVPQFKKVVFQEFTDGSFTQPLYRGELNEHLGLLGPYIRAEVEDNIMVTFRNQASRPYSFYSSLISYEEDQRQGAEPRKNFVKPNETKTYFWKVQHHMAPTKDEFDCKAWAYFSDVDLEKDVHSGLIGPLLVCHTNTLNPAHGRQVTVQEFALFFTIFDETKSWYFTENMERNCRAPCNIQMEDPTFKENYRFHAINGYIMDTLPGLVMAQDQRIRWYLLSMGSNENIHSIHFSGHVFTVRKKEEYKMALYNLYPGVFETVEMLPSKAGIWRVECLIGEHLHAGMSTLFLVYSNKCQTPLGMASGHIRDFQITASGQYGQWAPKLARLHYSGSINAWSTKEPFSWIKVDLLAPMIIHGIKTQGARQKFSSLYISQFIIMYSLDGKKWQTYRGNSTGTLMVFFGNVDSSGIKHNIFNPPIIARYIRLHPTHYSIRSTLRMELMGCDLNSCSMPLGMESKAISDAQITASSYFTNMFATWSPSKARLHLQGRSNAWRPQVNNPKEWLQVDFQKTMKVTGVTTQGVKSLLTSMYVKEFLISSSQDGHQWTLFFQNGKVKVFQGNQDSFTPVVNSLDPPLLTRYLRIHPQSWVHQIALRMEVLGCEAQDLY

SEQ ID NO: 2605 - DNA, 4371 bp, synthetic construct
  misc_feature 1..4371: note = Variant of human B-domain deleted Factor VIII
  source 1..4371: mol_type = other DNA
atgcagattgaactgtctacctgcttcttcctctgtttgctgaggttctgctttagcgccactagacggtactaccttggcgctgtggagctgtcctgggactatatgcagagtgatttgggagagcttcccgtcgacgcacgatttcctcctcgcgttccaaagtcatttcccttcaacacaagcgtggtgtacaagaagacgctcttcgtcgaattcaccgatcacctgttcaatatcgccaaacccagaccaccatggatgggtcttttggggcctaccatacaagcggaggtgtatgacacagttgttatcactctcaagaacatggcttctcatccggtaagtcttcacgcagtgggcgtgtcctactggaaagcttcagaaggagccgagtatgatgatcagacatcccagagggagaaagaagacgacaaggtatttccaggtgggtctcatacctatgtgtggcaagtgctcaaagagaatggccctatggcaagcgatccgctctgtttgacttacagctacctttcacacgttgacctcgtcaaggacctcaactccgggttgattggagccttgttggtatgcagggaaggatctcttgccaaagagaagacacagaccctccacaagtttatccttctctttgctgtgttcgatgagggcaaaagttggcatagcgaaacgaagaattccctcatgcaggatcgcgacgcagccagcgccagagcttggcccaagatgcacactgtgaacggatatgtcaataggtcacttcctggcttgattgggtgtcatcggaaaagtgtctactggcacgtgatcggaatggggacaacaccagaggtccactccatatttctcgaaggccataccttccttgttcgaaaccacagacaggcatccttggagatctctcccattacctttctcactgcccaaacgctccttatggacttgggtcagttccttctcttctgccatatcagctcacaccagcatgatggtatggaagcttatgtgaaagtcgacagttgtcctgaggagccacagttgcgcatgaagaataatgaagaagccgaggattacgacgacgatctcaccgattctgagatggacgtggtgaggtttgatgacgacaactctccctccttcattcaaatccggagcgtggcgaagaaacaccccaagacttgggtccactatatagcggcggaagaggaggattgggattacgctcctcttgtattggcaccagatgaccgctcatacaaaagccagtacctcaacaacggaccgcagagaattggccggaagtataagaaagtgcgatttatggcctatacagacgaaacctttaagacaagggaggccatccagcatgagagtgggattttgggacctcttctttacggcgaagttggtgataccctcctcatcatcttcaagaatcaagcttctcgcccctataacatttacccacacgggatcactgacgttaggcctttgtatagcagaagacttcccaaaggcgtgaagcatctcaaagacttccccattttgccaggcgagatctttaagtacaaatggaccgtcacagtggaagatggaccgactaaatcagaccctcgatgccttacgcggtactattcctccttcgtgaatatggagagagatttggcaagcggactcataggaccactcctcatctgttacaaggaatctgtagaccagaggggtaaccagattatgagtgataaacgcaatgtgatcctttttagcgtcttcgacgagaaccggtcctggtacttgaccgagaatatacaaaggttccttcccaaccccgcaggcgttcagttggaagaccctgagtttcaggccagcaatattatgcactcaatcaacggctatgtgtttgatagtctccagctttctgtttgcctccatgaagtagcctattggtacatcttgtcaattggtgctcaaacagacttcctctccgtcttcttctccggctacacctttaagcacaagatggtgtatgaggacactctcacactctttccattttctggagaaaccgtgttcatgagcatggagaatccaggcctttggatcttgggttgccacaacagtgattttcgcaatcggggaatgactgctctcctcaaagtcagcagctgtgataagaacacaggcgactattacgaagattcttacgaggacataagtgcctacttgttgtccaagaataacgccattgagcccagatcattctcccagaatcctcccgtgcttaaaaggcatcagcgcgaaatcaccagaactactcttcagtctgatcaagaggagattgactatgacgacaccataagcgtggaaatgaagaagtgtgatttcgatatctatgacgaagatgagaaccagtctccgcggagctttcagaagaagacgcgacactacttcattgcagcagtcgaaaggctttgggactacggtatgtcatcatcccctcatgtgttgcgcaatagagctcagagtggaagtgttccacagttcaagaaagtcgtctttcaagagtttacagatggcagcttcacacagcctctctatcggggcgagcttaacgaacatttgggactccttggtccctatatccgagccgaagtggaggacaacattatggttacctttaggaatcaagcctctcgcccctacagcttctactcctccctcatcagttatgaggaggatcagagacaaggcgctgaaccacggaagaactttgtgaaaccgaatgagacgaagacctacttctggaaagtacagcaccacatggcccccacaaaagacgaattcgattgcaaagcatgggcgtatttttcagacgttgacttggagaaagatgtacattcaggacttattggtcctttgttggtgtgtcacactaacactctcaatccagcccatggcaggcaggtgacagtccaggaattcgctcttttctttaccatctttgatgagaccaagtcctggtacttcacggaaaacatggagcgcaattgcagagccccctgtaacatacagatggaggaccctacctttaaggaaaattatcggttccacgcaatcaacggatacattatggatacactccctggccttgtgatggctcaggaccaacgaatcaggtggtacctcctcagcatgggttctaatgagaacatacactccattcacttttcaggacatgtgttcactgtccggaagaaagaagagtataagatggccctctacaatttgtatccaggcgtgtttgagaccgttgaaatgcttccctctaaagctggcatctggagagtagagtgcttgatcggagaacatcttcacgcaggtatgagcaccttgttcctcgtgtacagcaacaaatgtcagaccccacttggcatggccagtggacacattcgcgactttcagatcacagcatctggccagtatggacaatgggccccaaagttggctcgcctccattactccggtagcataaatgcgtggtccactaaagaacctttcagctggattaaggtcgatcttcttgcccccatgatcatccacggcattaagacacagggagcgaggcagaaattctcctccctctacatctcacagttcattattatgtatagtttggacggcaagaagtggcaaacttatagaggtaacagtactggaacactcatggtgttcttcggcaacgttgatagctctggcatcaaacacaacatctttaatcctcccataatagctcggtacatcagattgcatccgacccactacagcattaggagtacactccgaatggagcttatgggttgcgacttgaattcctgttcaatgccactcggaatggagtctaaagccatctctgatgcacagataaccgccagtagctactttacgaacatgtttgctacgtggtcaccctctaaggcaaggcttcatttgcaaggccggtctaatgcctggagacctcaggtgaacaacccgaaagaatggctccaggtggactttcagaagaccatgaaagtaacaggtgtcactactcagggagttaagtccttgctcaccagcatgtatgtgaaggagttccttatttcctcatcacaagatggccaccagtggaccctcttctttcagaatggtaaggtcaaagtgtttcagggcaatcaagacagcttcacacccgtggtgaacagtcttgatcctccactcttgacacgataccttcgaatccatccacagtcttgggttcaccagattgcattgcgcatggaagtacttggatgcgaggctcaggacctctac

SEQ ID NO: 2606 - protein, 1457 aa, synthetic construct
  REGION 1..1457: note = Variant of human B-domain deleted Factor VIII
MQIELSTCFFLCLLRFCFSATRRYYLGAVELSWDYMQSDLGELPVDARFPPRVPKSFPFNTSVVYKKTLFVEFTDHLFNIAKPRPPWMGLLGPTIQAEVYDTVVITLKNMASHPVSLHAVGVSYWKASEGAEYDDQTSQREKEDDKVFPGGSHTYVWQVLKENGPMASDPLCLTYSYLSHVDLVKDLNSGLIGALLVCREGSLAKEKTQTLHKFILLFAVFDEGKSWHSETKNSLMQDRDAASARAWPKMHTVNGYVNRSLPGLIGCHRKSVYWHVIGMGTTPEVHSIFLEGHTFLVRNHRQASLEISPITFLTAQTLLMDLGQFLLFCHISSHQHDGMEAYVKVDSCPEEPQLRMKNNEEAEDYDDDLTDSEMDVVRFDDDNSPSFIQIRSVAKKHPKTWVHYIAAEEEDWDYAPLVLAPDDRSYKSQYLNNGPQRIGRKYKKVRFMAYTDETFKTREAIQHESGILGPLLYGEVGDTLLIIFKNQASRPYNIYPHGITDVRPLYSRRLPKGVKHLKDFPILPGEIFKYKWTVTVEDGPTKSDPRCLTRYYSSFVNMERDLASGLIGPLLICYKESVDQRGNQIMSDKRNVILFSVFDENRSWYLTENIQRFLPNPAGVQLEDPEFQASNIMHSINGYVFDSLQLSVCLHEVAYWYILSIGAQTDFLSVFFSGYTFKHKMVYEDTLTLFPFSGETVFMSMENPGLWILGCHNSDFRNRGMTALLKVSSCDKNTGDYYEDSYEDISAYLLSKNNAIEPRSFSQNPPVLKRHQREITRTTLQSDQEEIDYDDTISVEMKKCDFDIYDEDENQSPRSFQKKTRHYFIAAVERLWDYGMSSSPHVLRNRAQSGSVPQFKKVVFQEFTDGSFTQPLYRGELNEHLGLLGPYIRAEVEDNIMVTFRNQASRPYSFYSSLISYEEDQRQGAEPRKNFVKPNETKTYFWKVQHHMAPTKDEFDCKAWAYFSDVDLEKDVHSGLIGPLLVCHTNTLNPAHGRQVTVQEFALFFTIFDETKSWYFTENMERNCRAPCNIQMEDPTFKENYRFHAINGYIMDTLPGLVMAQDQRIRWYLLSMGSNENIHSIHFSGHVFTVRKKEEYKMALYNLYPGVFETVEMLPSKAGIWRVECLIGEHLHAGMSTLFLVYSNKCQTPLGMASGHIRDFQITASGQYGQWAPKLARLHYSGSINAWSTKEPFSWIKVDLLAPMIIHGIKTQGARQKFSSLYISQFIIMYSLDGKKWQTYRGNSTGTLMVFFGNVDSSGIKHNIFNPPIIARYIRLHPTHYSIRSTLRMELMGCDLNSCSMPLGMESKAISDAQITASSYFTNMFATWSPSKARLHLQGRSNAWRPQVNNPKEWLQVDFQKTMKVTGVTTQGVKSLLTSMYVKEFLISSSQDGHQWTLFFQNGKVKVFQGNQDSFTPVVNSLDPPLLTRYLRIHPQSWVHQIALRMEVLGCEAQDLY

SEQ ID NO: 2607 - DNA, 4371 bp, synthetic construct
  misc_feature 1..4371: note = Variant of human B-domain deleted Factor VIII
  source 1..4371: mol_type = other DNA
atgcagattgaactgtctacctgcttcttcctctgtttgctgaggttctgctttagcgccactagacggtactaccttggcgctgtggagctgtcctgggactatatgcagagtgatttgggagagcttcccgtcgacgcacgatttcctcctcgcgttccaaagtcatttcccttcaacacaagcgtggtgtacaagaagacgctcttcgtcgaattcaccgatcacctgttcaatatcgccaaacccagaccaccatggatgggtcttttggggcctaccatacaagcggaggtgtatgacacagttgttatcactctcaagaacatggcttctcatccggtaagtcttcacgcagtgggcgtgtcctactggaaagcttcagaaggagccgagtatgatgatcagacatcccagagggagaaagaagacgacaaggtatttccaggtgggtctcatacctatgtgtggcaagtgctcaaagagaatggccctatggcaagcgatccgctctgtttgacttacagctacctttcacacgttgacctcgtcaaggacctcaactccgggttgattggagccttgttggtatgcagggaaggatctcttgccaaagagaagacacagaccctccacaagtttatccttctctttgctgtgttcgatgagggcaaaagttggcatagcgaaacgaagaattccctcatgcaggatcgcgacgcagccagcgccagagcttggcccaagatgcacactgtgaacggatatgtcaataggtcacttcctggcttgattgggtgtcatcggaaaagtgtctactggcacgtgatcggaatggggacaacaccagaggtccactccatatttctcgaaggccataccttccttgttcgaaaccacagacaggcatccttggagatctctcccattacctttctcactgcccaaacgctccttatggacttgggtcagttccttctcttctgccatatcagctcacaccagcatgatggtatggaagcttatgtgaaagtagacagttgtcctgaggagccacagttgcgcatgaagaataatgaagaagccgaggattacgacgacgatctcaccgattctgagatggacgtggtgaggtttgatgacgacaactctccctccttcattcaaatccggagcgtggcgaagaaacaccccaagacttgggtccactatatagcggcggaagaggaggattgggattacgctcctcttgtattggcaccagatgaccgctcatacaaaagccagtacctcaacaacggaccgcagagaattggccggaagtataagaaagtgcgatttatggcctatacagacgaaacctttaagacaagggaggccatccagcatgagagtgggattttgggacctcttctttacggcgaagttggtgataccctcctcatcatcttcaagaatcaagcttctcgcccctataacatttacccacacgggatcactgacgttaggcctttgtatagcagaagacttcccaaaggcgtgaagcatctcaaagacttccccattttgccaggcgagatctttaagtacaaatggaccgtcacagtggaagatggaccgactaaatcagaccctcgatgccttacgcggtactattcctccttcgtgaatatggagagagatttggcaagcggactcataggaccactcctcatctgttacaaggaatctgtagaccagaggggtaaccagattatgagtgataaacgcaatgtgatcctttttagcgtcttcgacgagaaccggtcctggtacttgaccgagaatatacaaaggttccttcccaaccccgcaggcgttcagttggaagaccctgagtttcaggccagcaatattatgcactcaatcaacggctatgtgtttgatagtctccagctttctgtttgcctccatgaagtagcctattggtacatcttgtcaattggtgctcaaacagacttcctctccgtcttcttctccggctacacctttaagcacaagatggtgtatgaggacactctcacactctttccattttctggagaaaccgtgttcatgagcatggagaatccaggcctttggatcttgggttgccacaacagtgattttcgcaatcggggaatgactgctctcctcaaagtcagcagctgtgataagaacacaggcgactattacgaagattcttacgaggacataagtgcctacttgttgtccaagaataacgccattgagcccagatcattctcccagaatcctcccgtgcttaaaaggcatcagcgcgaaatcaccagaactactcttcagtctgatcaagaggagattgactatgacgacaccataagcgtggaaatgaagaaggaggatttcgatatctatgacgaagataagaaccagtctccgcggagctttcagaagaagacgcgacactacttcattgcagcagtcgaaaggctttgggactacggtatgtcatcatcccctcatgtgttgcgcaatagagctcagagtggaagtgttccacagttcaagaaagtcgtctttcaagagtttacagatggcagcttcacacagcctctctatcggggcgagcttaacgaacatttgggactccttggtccctatatccgagccgaagtggaggacaacattatggttacctttaggaatcaagcctctcgcccctacagcttctactcctccctcatcagttatgaggaggatcagagacaaggcgctgaaccacggaagaactttgtgaaaccgaatgagacgaagacctacttctggaaagtacagcaccacatggcccccacaaaagacgaattcgattgcaaagcatgggcgtatttttcagacgttgacttggagaaagatgtacattcaggacttattggtcctttgttggtgtgtcacactaacactctcaatccagcccatggcaggcaggtgacagtccaggaattcgctcttttctttaccatctttgatgagaccaagtcctggtacttcacggaaaacatggagcgcaattgcagagccccctgtaacatacagatggaggaccctacctttaaggaaaattatcggttccacgcaatcaacggatacattatggatacactccctggccttgtgatggctcaggaccaacgaatcaggtggtacctcctcagcatgggttctaatgagaacatacactccattcacttttcaggacatgtgttcactgtccggaagaaagaagagtataagatggccctctacaatttgtatccaggcgtgtttgagaccgttgaaatgcttccctctaaagctggcatctggagagtagagtgcttgatcggagaacatcttcacgcaggtatgagcaccttgttcctcgtgtacagcaacaaatgtcagaccccacttggcatggccagtggacacattcgcgactttcagatcacagcatctggccagtatggacaatgggccccaaagttggctcgcctccattactccggtagcataaatgcgtggtccactaaagaacctttcagctggattaaggtcgatcttcttgcccccatgatcatccacggcattaagacacagggagcgaggcagaaattctcctccctctacatctcacagttcattattatgtatagtttggacggcaagaagtggcaaacttatagaggtaacagtactggaacactcatggtgttcttcggcaacgttgatagctctggcatcaaacacaacatctttaatcctcccataatagctcggtacatcagattgcatccgacccactacagcattaggagtacactccgaatggagcttatgggttgcgacttgaattcctgttcaatgccactcggaatggagtctaaagccatctctgatgcacagataaccgccagtagctactttacgaacatgtttgctacgtggtcaccctctaaggcaaggcttcatttgcaaggccggtctaatgcctggagacctcaggtgaacaacccgaaagaatggctccaggtggactttcagaagaccatgaaagtaacaggtgtcactactcagggagttaagtccttgctcaccagcatgtatgtgaaggagttccttatttcctcatcacaagatggccaccagtggaccctcttctttcagaatggtaaggtcaaagtgtttcagggcaatcaagacagcttcacacccgtggtgaacagtcttgatcctccactcttgacacgataccttcgaatccatccacagtcttgggttcaccagattgcattgcgcatggaagtacttggatgcgaggctcaggacctctac

SEQ ID NO: 2608 - protein, 1457 aa, synthetic construct
  REGION 1..1457: note = Variant of human B-domain deleted Factor VIII
MQIELSTCFFLCLLRFCFSATRRYYLGAVELSWDYMQSDLGELPVDARFPPRVPKSFPFNTSVVYKKTLFVEFTDHLFNIAKPRPPWMGLLGPTIQAEVYDTVVITLKNMASHPVSLHAVGVSYWKASEGAEYDDQTSQREKEDDKVFPGGSHTYVWQVLKENGPMASDPLCLTYSYLSHVDLVKDLNSGLIGALLVCREGSLAKEKTQTLHKFILLFAVFDEGKSWHSETKNSLMQDRDAASARAWPKMHTVNGYVNRSLPGLIGCHRKSVYWHVIGMGTTPEVHSIFLEGHTFLVRNHRQASLEISPITFLTAQTLLMDLGQFLLFCHISSHQHDGMEAYVKVDSCPEEPQLRMKNNEEAEDYDDDLTDSEMDVVRFDDDNSPSFIQIRSVAKKHPKTWVHYIAAEEEDWDYAPLVLAPDDRSYKSQYLNNGPQRIGRKYKKVRFMAYTDETFKTREAIQHESGILGPLLYGEVGDTLLIIFKNQASRPYNIYPHGITDVRPLYSRRLPKGVKHLKDFPILPGEIFKYKWTVTVEDGPTKSDPRCLTRYYSSFVNMERDLASGLIGPLLICYKESVDQRGNQIMSDKRNVILFSVFDENRSWYLTENIQRFLPNPAGVQLEDPEFQASNIMHSINGYVFDSLQLSVCLHEVAYWYILSIGAQTDFLSVFFSGYTFKHKMVYEDTLTLFPFSGETVFMSMENPGLWILGCHNSDFRNRGMTALLKVSSCDKNTGDYYEDSYEDISAYLLSKNNAIEPRSFSQNPPVLKRHQREITRTTLQSDQEEIDYDDTISVEMKKEDFDIYDEDKNQSPRSFQKKTRHYFIAAVERLWDYGMSSSPHVLRNRAQSGSVPQFKKVVFQEFTDGSFTQPLYRGELNEHLGLLGPYIRAEVEDNIMVTFRNQASRPYSFYSSLISYEEDQRQGAEPRKNFVKPNETKTYFWKVQHHMAPTKDEFDCKAWAYFSDVDLEKDVHSGLIGPLLVCHTNTLNPAHGRQVTVQEFALFFTIFDETKSWYFTENMERNCRAPCNIQMEDPTFKENYRFHAINGYIMDTLPGLVMAQDQRIRWYLLSMGSNENIHSIHFSGHVFTVRKKEEYKMALYNLYPGVFETVEMLPSKAGIWRVECLIGEHLHAGMSTLFLVYSNKCQTPLGMASGHIRDFQITASGQYGQWAPKLARLHYSGSINAWSTKEPFSWIKVDLLAPMIIHGIKTQGARQKFSSLYISQFIIMYSLDGKKWQTYRGNSTGTLMVFFGNVDSSGIKHNIFNPPIIARYIRLHPTHYSIRSTLRMELMGCDLNSCSMPLGMESKAISDAQITASSYFTNMFATWSPSKARLHLQGRSNAWRPQVNNPKEWLQVDFQKTMKVTGVTTQGVKSLLTSMYVKEFLISSSQDGHQWTLFFQNGKVKVFQGNQDSFTPVVNSLDPPLLTRYLRIHPQSWVHQIALRMEVLGCEAQDLY

SEQ ID NO: 2609 - DNA, 4371 bp, synthetic construct
  misc_feature 1..4371: note = Variant of human B-domain deleted Factor VIII
  source 1..4371: mol_type = other DNA
atgcagattgaactgtctacctgcttcttcctctgtttgctgaggttctgctttagcgccactagacggtactaccttggcgctgtggagctgtcctgggactatatgcagagtgatttgggagagcttcccgtcgacgcacgatttcctcctcgcgttccaaagtcatttcccttcaacacaagcgtggtgtacaagaagacgctcttcgtcgaattcaccgatcacctgttcaatatcgccaaacccagaccaccatggatgggtcttttggggcctaccatacaagcggaggtgtatgacacagttgttatcactctcaagaacatggcttctcatccggtaagtcttcacgcagtgggcgtgtcctactggaaagcttcagaaggagccgagtatgatgatcagacatcccagagggagaaagaagacgacaaggtatttccaggtgggtctcatacctatgtgtggcaagtgctcaaagagaatggccctatggcaagcgatccgctctgtttgacttacagctacctttcacacgttgacctcgtcaaggacctcaactccgggttgattggagccttgttggtatgcagggaaggatctcttgccaaagagaagacacagaccctccacaagtttatccttctctttgctgtgttcgatgagggcaaaagttggcatagcgaaacgaagaattccctcatgcaggatcgcgacgcagccagcgccagagcttggcccaagatgcacactgtgaacggatatgtcaataggacgcttcctggcttgattgggtgtcatcggaaaagtgtctactggcacgtgatcggaatggggacaacaccagaggtccactccatatttctcgaaggccataccttccttgttcgaaaccacagacaggcatccttggagatctctcccattacctttctcactgcccaaacgctccttatggacttgggtcagttccttctcttctgccatatcagctcacaccagcatgatggtatggaagcttatgtgaaagtcgacagttgtcctgaggagccacagttgcgcatgaagaataatgaagaagccgaggattacgacgacgatctcaccgattctgagatggacgtggtgaggtttgatgacgacaactctccctccttcattcaaatccggagcgtggcgaagaaacaccccaagacttgggtccactatatagcggcggaagaggaggattgggattacgctcctcttgtattggcaccagatgaccgctcatacaaaagccagtacctcaacaacggaccgcagagaattggccggaagtataagaaagtgcgatttatggcctatacagacgaaacctttaagacaagggaggccatccagcatgagagtgggattttgggacctcttctttacggcgaagttggtgataccctcctcatcatcttcaagaatcaagcttctcgcccctataacatttacccacacgggatcactgacgttaggcctttgtatagcagaagacttcccaaaggcgtgaagcatctcaaagacttccccattttgccaggcgagatctttaagtacaaatggaccgtcacagtggaagatggaccgactaaatcagaccctcgatgccttacgcggtactattcctccttcgtgaatatggagagagatttggcaagcggactcataggaccactcctcatctgttacaaggaatctgtagaccagaggggtaaccagattatgagtgataaacgcaatgtgatcctttttagcgtcttcgacgagaaccggtcctggtacttgaccgagaatatacaaaggttccttcccaaccccgcaggcgttcagttggaagaccctgagtttcaggccagcaatattatgcactcaatcaacggctatgtgtttgatagtctccagctttctgtttgcctccatgaagtagcctattggtacatcttgtcaattggtgctcaaacagacttcctctccgtcttcttctccggctacacctttaagcacaagatggtgtatgaggacactctcacactctttccattttctggagaaaccgtgttcatgagcatggagaatccaggcctttggatcttgggttgccacaacagtgattttcgcaatcggggaatgactgctctcctcaaagtcagcagctgtgataagaacacaggcgactattacgaagattcttacgaggacataagtgcctacttgttgtccaagaataacgccattgagcccagatcattctcccagaatcctcccgtgcttaaaaggcatcagcgcgaaatcaccagaactactcttcagtctgatcaagaggagattgactatgacgacaccataagcgtggaaatgaagaaggaggatttcgatatctatgacgaagatgagaaccagtctccgcggagctttcagaagaagacgcgacactacttcattgcagcagtcgaaaggctttgggactacggtatgtcatcatcccctcatgtgttgcgcaatagagctcagagtggaagtgttccacagttcaagaaagtcgtctttcaagagtttacagatggcagcttcacacagcctctctatcggggcgagcttaacgaacatttgggactccttggtccctatatccgagccgaagtggaggacaacattatggttacctttaggaatcaagcctctcgcccctacagcttctactcctccctcatcagttatgaggaggatcagagacaaggcgctgaaccacggaagaactttgtgaaaccgaatgagacgaagacctacttctggaaagtacagcaccacatggcccccacaaaagacgaattcgattgcaaagcatgggcgtatttttcagacgttgacttggagaaagatgtacattcaggacttattggtcctttgttggtgtgtcacactaacactctcaatccagcccatggcaggcaggtgacagtccaggaattcgctcttttctttaccatctttgatgagaccaagtcctggtacttcacggaaaacatggagcgcaattgcagagccccctgtaacatacagatggaggaccctacatttaaggaaaattatcggttccacgcaatcaacggatacattatggatacactccctggccttgtgatggctcaggaccaacgaatcaggtggtacctcctcagcatgggttctaatgagaacatacactccattcacttttcaggacatgtgttcactgtccggaagaaagaagagtataagatggccctctacaatttgtatccaggcgtgtttgagaccgttgaaatgcttccctctaaagctggcatctggagagtagagtgcttgatcggagaacatcttcacgcaggtatgagcaccttgttcctcgtgtacagcaacaaatgtcagaccccacttggcatggccagtggacacattcgcgactttcagatcacagcatctggccagtatggacaatgggccccaaagttggctcgcctccattactccggtagcataaatgcgtggtccactaaagaacctttcagctggattaaggtcgatcttcttgcccccatgatcatccacggcattaagacacagggagcgaggcagaaattctcctccctctacatctcacagttcattattatgtatagtttggacggcaagaagtggcaaacttatagaggtaacagtactggaacactcatggtgttcttcggcaacgttgatagctctggcatcaaacacaacatctttaatcctcccataatagctcggtacatcagattgcatccgacccactacagcattaggagtacactccgaatggagcttatgggttgcgacttgaattcctgttcaatgccactcggaatggagtctaaagccatctctgatgcacagataaccgccagtagctactttacgaacatgtttgctacgtggtcaccctctaaggcaaggcttcatttgcaaggccggtctaatgcctggagacctcaggtgaacaacccgaaagaatggctccaggtggactttcagaagaccatgaaagtaacaggtgtcactactcagggagttaagtccttgctcaccagcatgtatgtgaaggagttccttatttcctcatcacaagatggccaccagtggaccctcttctttcagaatggtaaggtcaaagtgtttcagggcaatcaagacagcttcacacccgtggtgaacagtcttgatcctccactcttgacacgataccttcgaatccatccacagtcttgggttcaccagattgcattgcgcatggaagtacttggatgcgaggctcaggacctctac

SEQ ID NO: 2610 - protein, 1457 aa, synthetic construct
  REGION 1..1457: note = Variant of human B-domain deleted Factor VIII
MQIELSTCFFLCLLRFCFSATRRYYLGAVELSWDYMQSDLGELPVDARFPPRVPKSFPFNTSVVYKKTLFVEFTDHLFNIAKPRPPWMGLLGPTIQAEVYDTVVITLKNMASHPVSLHAVGVSYWKASEGAEYDDQTSQREKEDDKVFPGGSHTYVWQVLKENGPMASDPLCLTYSYLSHVDLVKDLNSGLIGALLVCREGSLAKEKTQTLHKFILLFAVFDEGKSWHSETKNSLMQDRDAASARAWPKMHTVNGYVNRTLPGLIGCHRKSVYWHVIGMGTTPEVHSIFLEGHTFLVRNHRQASLEISPITFLTAQTLLMDLGQFLLFCHISSHQHDGMEAYVKVDSCPEEPQLRMKNNEEAEDYDDDLTDSEMDVVRFDDDNSPSFIQIRSVAKKHPKTWVHYIAAEEEDWDYAPLVLAPDDRSYKSQYLNNGPQRIGRKYKKVRFMAYTDETFKTREAIQHESGILGPLLYGEVGDTLLIIFKNQASRPYNIYPHGITDVRPLYSRRLPKGVKHLKDFPILPGEIFKYKWTVTVEDGPTKSDPRCLTRYYSSFVNMERDLASGLIGPLLICYKESVDQRGNQIMSDKRNVILFSVFDENRSWYLTENIQRFLPNPAGVQLEDPEFQASNIMHSINGYVFDSLQLSVCLHEVAYWYILSIGAQTDFLSVFFSGYTFKHKMVYEDTLTLFPFSGETVFMSMENPGLWILGCHNSDFRNRGMTALLKVSSCDKNTGDYYEDSYEDISAYLLSKNNAIEPRSFSQNPPVLKRHQREITRTTLQSDQEEIDYDDTISVEMKKEDFDIYDEDENQSPRSFQKKTRHYFIAAVERLWDYGMSSSPHVLRNRAQSGSVPQFKKVVFQEFTDGSFTQPLYRGELNEHLGLLGPYIRAEVEDNIMVTFRNQASRPYSFYSSLISYEEDQRQGAEPRKNFVKPNETKTYFWKVQHHMAPTKDEFDCKAWAYFSDVDLEKDVHSGLIGPLLVCHTNTLNPAHGRQVTVQEFALFFTIFDETKSWYFTENMERNCRAPCNIQMEDPTFKENYRFHAINGYIMDTLPGLVMAQDQRIRWYLLSMGSNENIHSIHFSGHVFTVRKKEEYKMALYNLYPGVFETVEMLPSKAGIWRVECLIGEHLHAGMSTLFLVYSNKCQTPLGMASGHIRDFQITASGQYGQWAPKLARLHYSGSINAWSTKEPFSWIKVDLLAPMIIHGIKTQGARQKFSSLYISQFIIMYSLDGKKWQTYRGNSTGTLMVFFGNVDSSGIKHNIFNPPIIARYIRLHPTHYSIRSTLRMELMGCDLNSCSMPLGMESKAISDAQITASSYFTNMFATWSPSKARLHLQGRSNAWRPQVNNPKEWLQVDFQKTMKVTGVTTQGVKSLLTSMYVKEFLISSSQDGHQWTLFFQNGKVKVFQGNQDSFTPVVNSLDPPLLTRYLRIHPQSWVHQIALRMEVLGCEAQDLY

SEQ ID NO: 2611 - DNA, 4371 bp, synthetic construct
  misc_feature 1..4371: note = Variant of human B-domain deleted Factor VIII
  source 1..4371: mol_type = other DNA
atgcagattgaactgtctacctgcttcttcctctgtttgctgaggttctgctttagcgccactagacggtactaccttggcgctgtggagctgtcctgggactatatgcagagtgatttgggagagcttcccgtcgacgcacgatttcctcctcgcgttccaaagtcatttcccttcaacacaagcgtggtgtacaagaagacgctcttcgtcgaattcaccgatcacctgttcaatatcgccaaacccagaccaccatggatgggtcttttggggcctaccatacaagcggaggtgtatgacacagttgttatcactctcaagaacatggcttctcatccggtaagtcttcacgcagtgggcgtgtcctactggaaagcttcagaaggagccgagtatgatgatcagacatcccagagggagaaagaagacgacaaggtatttccaggtgggtctcatacctatgtgtggcaagtgctcaaagagaatggccctatggcaagcgatccgctctgtttgacttacagctacctttcacacgttgacctcgtcaaggacctcaactccgggttgattggagccttgttggtatgcagggaaggatctcttgccaaagagaagacacagaccctccacaagtttatccttctctttgctgtgttcgatgagggcaaaagttggcatagcgaaacgaagaattccctcatgcaggatcgcgacgcagccagcgccagagcttggcccaagatgcacactgtgaacggatatgtcaataggtcacttcctggcttgattgggtgtcatcggaaaagtgtctactggcacgtgatcggaatggggacaacaccagaggtccactccatatttctcgaaggccataccttccttgttcgaaaccacagacaggcatccttggagatctctcccattacctttctcactgcccaaacgctccttatggacttgggtcagttccttctcttctgccatatcaggtcacaccagcatgatggtatggaagcttatgtgaaagtcgacagttgtcctgaggagccacagttgcgcatgaagaataatgaagaagccgaggattacgacgacgatctcaccgattctgagatggacgtggtgaggtttgatgacgacaactctccctccttcattcaaatccggagcgtggcgaagaaacaccccaagacttgggtccactatatagcggcggaagaggaggattgggattacgctcctcttgtattggcaccagatgaccgctcatacaaaagccagtacctcaacaacggaccgcagagaattggccggaagtataagaaagtgcgatttatggcctatacagacgaaacctttaagacaagggaggccatccagcatgagagtgggattttgggacctcttctttacggcgaagttggtgataccctcctcatcatcttcaagaatcaagcttctcgcccctataacatttacccacacgggatcactgacgttaggcctttgtatagcagaagacttcccaaaggcgtgaagcatctcaaagacttccccattttgccaggcgagatctttaagtacaaatggaccgtcacagtggaagatggaccgactaaatcagaccctcgatgccttacgcggtactattcctccttcgtgaatatggagagagatttggcaagcggactcataggaccactcctcatctgttacaaggaatctgtagaccagaggggtaaccagattatgagtgataaacgcaatgtgatcctttttagcgtcttcgacgagaaccggtcctggtacttgaccgagaatatacaaaggttccttcccaaccccgcaggcgttcagttggaagaccctgagtttcaggccagcaatattatgcactcaatcaacggctatgtgtttgatagtctccagctttctgtttgcctccatgaagtagcctattggtacatcttgtcaattggtgctcaaacagacttcctctccgtcttcttctccggctacacctttaagcacaagatggtgtatgaggacactctcacactctttccattttctggagaaaccgtgttcatgagcatggagaatccaggcctttggatcttgggttgccacaacagtgattttcgcaatcggggaatgactgctctcctcaaagtcagcagctgtgataagaacacaggcgactattacgaagattcttacgaggacataagtgcctacttgttgtccaagaataacgccattgagcccagatcattctcccagaatcctcccgtgcttaaaaggcatcagcgcgaaatcaccagaactactcttcagtctgatcaagaggagattgactatgacgacaccataagcgtggaaatgaagaaggaggatttcgatatctatgacgaagatgagaaccagtctccgcggagctttcagaagaagacgcgacactacttcattgcagcagtcgaaaggctttgggactacggtatgtcatcatcccctcatgtgttgcgcaatagagctcagagtggaagtgttccacagttcaagaaagtcgtctttcaagagtttacagatggcagcttcacacagcctctctatcggggcgagcttaacgaacatttgggactccttggtccctatatccgagccgaagtggaggacaacattatggttacctttaggaatcaagcctctcgcccctacagcttctactcctccctcatcagttatgaggaggatcagagacaaggcgctgaaccacggaagaactttgtgaaaccgaatgagacgaagacctacttctggaaagtacagcaccacatggcccccacaaaagacgaattcgattgcaaagcatgggcgtatttttcagacgttgacttggagaaagatgtacattcaggacttattggtcctttgttggtgtgtcacactaacactctcaatccagcccatggcaggcaggtgacagtccaggaattcgctcttttctttaccatctttgatgagaccaagtcctggtacttcacggaaaacatggagcgcaattgcagagccccctgtaacatacagatggaggaccctacctttaaggaaaattatcggttccacgcaatcaacggatacattatggatacactccctggccttgtgatggctcaggaccaacgaatcaggtggtacctcctcagcatgggttctaatgagaacatacactccattcacttttcaggacatgtgttcactgtccggaagaaagaagagtataagatggccctctacaatttgtatccaggcgtgtttgagaccgttgaaatgcttccctctaaagctggcatctggagagtagagtgcttgatcggagaacatcttcacgcaggtatgagcaccttgttcctcgtgtacagcaacaaatgtcagaccccacttggcatggccagtggacacattcgcgactttcagatcacagcatctggccagtatggacaatgggccccaaagttggctcgcctccattactccggtagcataaatgcgtggtccactaaagaacctttcagctggattaaggtcgatcttcttgcccccatgatcatccacggcattaagacacagggagcgaggcagaaattctcctccctctacatctcacagttcattattatgtatagtttggacggcaagaagtggcaaacttatagaggtaacagtactggaacactcatggtgttcttcggcaacgttgatagctctggcatcaaacacaacatctttaatcctcccataatagctcggtacatcagattgcatccgacccactacagcattaggagtacactccgaatggagcttatgggttgcgacttgaattcctgttcaatgccactcggaatggagtctaaagccatctctgatgcacagataaccgccagtagctactttacgaacatgtttgctacgtggtcaccctctaaggcaaggcttcatttgcaaggccggtctaatgcctggagacctcaggtgaacaacccgaaagaatggctccaggtggactttcagaagaccatgaaagtaacaggtgtcactactcagggagttaagtccttgctcaccagcatgtatgtgaaggagttccttatttcctcatcacaagatggccaccagtggaccctcttctttcagaatggtaaggtcaaagtgtttcagggcaatcaagacagcttcacacccgtggtgaacagtcttgatcctccactcttgacacgataccttcgaatccatccacagtcttgggttcaccagattgcattgcgcatggaagtacttggatgcgaggctcaggacctctac

SEQ ID NO: 2612 - protein, 1457 aa, synthetic construct
  REGION 1..1457: note = Variant of human B-domain deleted Factor VIII
MQIELSTCFFLCLLRFCFSATRRYYLGAVELSWDYMQSDLGELPVDARFPPRVPKSFPFNTSVVYKKTLFVEFTDHLFNIAKPRPPWMGLLGPTIQAEVYDTVVITLKNMASHPVSLHAVGVSYWKASEGAEYDDQTSQREKEDDKVFPGGSHTYVWQVLKENGPMASDPLCLTYSYLSHVDLVKDLNSGLIGALLVCREGSLAKEKTQTLHKFILLFAVFDEGKSWHSETKNSLMQDRDAASARAWPKMHTVNGYVNRSLPGLIGCHRKSVYWHVIGMGTTPEVHSIFLEGHTFLVRNHRQASLEISPITFLTAQTLLMDLGQFLLFCHIRSHQHDGMEAYVKVDSCPEEPQLRMKNNEEAEDYDDDLTDSEMDVVRFDDDNSPSFIQIRSVAKKHPKTWVHYIAAEEEDWDYAPLVLAPDDRSYKSQYLNNGPQRIGRKYKKVRFMAYTDETFKTREAIQHESGILGPLLYGEVGDTLLIIFKNQASRPYNIYPHGITDVRPLYSRRLPKGVKHLKDFPILPGEIFKYKWTVTVEDGPTKSDPRCLTRYYSSFVNMERDLASGLIGPLLICYKESVDQRGNQIMSDKRNVILFSVFDENRSWYLTENIQRFLPNPAGVQLEDPEFQASNIMHSINGYVFDSLQLSVCLHEVAYWYILSIGAQTDFLSVFFSGYTFKHKMVYEDTLTLFPFSGETVFMSMENPGLWILGCHNSDFRNRGMTALLKVSSCDKNTGDYYEDSYEDISAYLLSKNNAIEPRSFSQNPPVLKRHQREITRTTLQSDQEEIDYDDTISVEMKKEDFDIYDEDENQSPRSFQKKTRHYFIAAVERLWDYGMSSSPHVLRNRAQSGSVPQFKKVVFQEFTDGSFTQPLYRGELNEHLGLLGPYIRAEVEDNIMVTFRNQASRPYSFYSSLISYEEDQRQGAEPRKNFVKPNETKTYFWKVQHHMAPTKDEFDCKAWAYFSDVDLEKDVHSGLIGPLLVCHTNTLNPAHGRQVTVQEFALFFTIFDETKSWYFTENMERNCRAPCNIQMEDPTFKENYRFHAINGYIMDTLPGLVMAQDQRIRWYLLSMGSNENIHSIHFSGHVFTVRKKEEYKMALYNLYPGVFETVEMLPSKAGIWRVECLIGEHLHAGMSTLFLVYSNKCQTPLGMASGHIRDFQITASGQYGQWAPKLARLHYSGSINAWSTKEPFSWIKVDLLAPMIIHGIKTQGARQKFSSLYISQFIIMYSLDGKKWQTYRGNSTGTLMVFFGNVDSSGIKHNIFNPPIIARYIRLHPTHYSIRSTLRMELMGCDLNSCSMPLGMESKAISDAQITASSYFTNMFATWSPSKARLHLQGRSNAWRPQVNNPKEWLQVDFQKTMKVTGVTTQGVKSLLTSMYVKEFLISSSQDGHQWTLFFQNGKVKVFQGNQDSFTPVVNSLDPPLLTRYLRIHPQSWVHQIALRMEVLGCEAQDLY

SEQ ID NO: 2613 - DNA, 4371 bp, synthetic construct
  misc_feature 1..4371: note = Variant of human B-domain deleted Factor VIII
  source 1..4371: mol_type = other DNA
atgcagattgaactgtctacctgcttcttcctctgtttgctgaggttctgctttagcgccactagacggtactaccttggcgctgtggagctgtcctgggactatatgcagagtgatttgggagagcttcccgtcgacgcacgatttcctcctcgcgttccaaagtcatttcccttcaacacaagcgtggtgtacaagaagacgctcttcgtcgaattcaccgatcacctgttcaatatcgccaaacccagaccaccatggatgggtcttttggggcctaccatacaagcggaggtgtatgacacagttgttatcactctcaagaacatggcttctcatccggtaagtcttcacgcagtgggcgtgtcctactggaaagcttcagaaggagccgagtatgatgatcagacatcccagagggagaaagaagacgacaaggtatttccaggtgggtctcatacctatgtgtggcaagtgctcaaagagaatggccctatggcaagcgatccgctctgtttgacttacagctacctttcacacgttgacctcgtcaaggacctcaactccgggttgattggagccttgttggtatgcagggaaggatctcttgccaaagagaagacacagaccctccacaagtttatccttctctttgctgtgttcgatgagggcaaaagttggcatagcgaaacgaagaattccctcatgcaggatcgcgacgcagccagcgccagagcttggcccaagatgcacactgtgaacggatatgtcaataggtcacttcctggcttgattgggtgtcatcggaaaagtgtctactggcacgtgatcggaatggggacaacaccagaggtccactccatatttctcgaaggccataccttccttgttcgaaaccacagacaggcatccttggagatctctcccattacctttctcactgcccaaacgctccttatggacttgggtcagttccttctcttctgccatatcagctcacaccagcatgatggtatggaagcttatgtgaaagtcgacagttgtcctgaggagccacagttgcgcatgaagaataatgaagaagccgaggattacgacgacgatctcaccgattctgagatggacgtggtgaggtttgatgacgacaactctccctccttcattcaaatccggagcgtggcgaagaaacaccccaagacttgggtccactatatagcggcggaagaggaggattgggattacgctcctcttgtattggcaccagatgaccgctcatacaaaagccagtacctcaacaacggaccgcagagaattggccggaagtataagaaagtgcgatttatggcctatacagacgaaacctttaagacaagggaggccatccagcatgagagtgggattttgggacctcttctttacggcgaagttggtgataccctcctcatcatcttcaagaatcaagcttctcgcccctataacatttacccacacgggatcactgacgttaggcctttgtatagcagaagacttcccaaaggcgtgaagcatctcaaagacttccccattttgccaggcgagatctttaagtacaaatggaccgtcacagtggaagatggaccgactaaatcagaccctcgatgccttacgcggtactattcctccttcgtgaatatggagagagatttggcaagcggactcataggaccactcctcatctgttacaaggaatctgtagaccagaggggtaaccagattatgagtgataaacgcaatgtgatcctttttagcgtcttcgacgagaaccggtcctggtacttgaccgagaatatacaaaggttccttcccaaccccgcaggcgttcagttggaagaccctgagtttcaggccagcaatattatgcactcaatcaacggctatgtgtttgatagtctccagctttctgtttgcctccatgaagtagcctattggtacatcttgtcaattggtgctcaaacagacttcctctccgtcttcttctccggctacacctttaagcacaagatggtgtatgaggacactctcacactctttccattttctggagaaaccgtgttcatgagcatggagaatccaggcctttggatcttgggttgccacaacagtgattttcgcaatcggggaatgactgctctcctcaaagtcagcagctgtgataagaacacaggcgactattacgaagattcttacgaggacataagtgcctacttgaattccaagaataacgccattgagcccagatcattctcccagaatcctcccgtgcttaaaaggcatcagcgcgaaatcaccagaactactcttcagtctgatcaagaggagattgactatgacgacaccataagcgtggaaatgaagaaggaggatttcgatatctatgacgaagatgagaaccagtctccgcggagctttcagaagaagacgcgacactacttcattgcagcagtcgaaaggctttgggactacggtatgtcatcatcccctcatgtgttgcgcaatagagctcagagtggaagtgttccacagttcaagaaagtcgtctttcaagagtttacagatggcagcttcacacagcctctctatcggggcgagcttaacgaacatttgggactccttggtccctatatccgagccgaagtggaggacaacattatggttacctttaggaatcaagcctctcgcccctacagcttctactcctccctcatcagttatgaggaggatcagagacaaggcgctgaaccacggaagaactttgtgaaaccgaatgagacgaagacctacttctggaaagtacagcaccacatggcccccacaaaagacgaattcgattgcaaagcatgggcgtatttttcagacgttgacttggagaaagatgtacattcaggacttattggtcctttgttggtgtgtcacactaacactctcaatccagcccatggcaggcaggtgacagtccaggaattcgctcttttctttaccatctttgatgagaccaagtcctggtacttcacggaaaacatggagcgcaattgcagagccccctgtaacatacagatggaggaccctacctttaaggaaaattatcggttccacgcaatcaacggatacattatggatacactccctggccttgtgatggctcaggaccaacgaatcaggtggtacctcctcagcatgggttctaatgagaacatacactccattcacttttcaggacatgtgttcactgtccggaagaaagaagagtataagatggccctctacaatttgtatccaggcgtgtttgagaccgttgaaatgcttccctctaaagctggcatctggagagtagagtgcttgatcggagaacatcttcacgcaggtatgagcaccttgttcctcgtgtacagcaacaaatgtcagaccccacttggcatggccagtggacacattcgcgactttcagatcacagcatctggccagtatggacaatgggccccaaagttggctcgcctccattactccggtagcataaatgcgtggtccactaaagaacctttcagctggattaaggtcgatcttcttgcccccatgatcatccacggcattaagacacagggagcgaggcagaaattctcctccctctacatctcacagttcattattatgtatagtttggacggcaagaagtggcaaacttatagaggtaacagtactggaacactcatggtgttcttcggcaacgttgatagctctggcatcaaacacaacatctttaatcctcccataatagctcggtacatcagattgcatccgacccactacagcattaggagtacactccgaatggagcttatgggttgcgacttgaattcctgttcaatgccactcggaatggagtctaaagccatctctgatgcacagataaccgccagtagctactttacgaacatgtttgctacgtggtcaccctctaaggcaaggcttcatttgcaaggccggtctaatgcctggagacctcaggtgaacaacccgaaagaatggctccaggtggactttcagaagaccatgaaagtaacaggtgtcactactcagggagttaagtccttgctcaccagcatgtatgtgaaggagttccttatttcctcatcacaagatggccaccagtggaccctcttctttcagaatggtaaggtcaaagtgtttcagggcaatcaagacagcttcacacccgtggtgaacagtcttgatcctccactcttgacacgataccttcgaatccatccacagtcttgggttcaccagattgcattgcgcatggaagtacttggatgcgaggctcaggacctctac

SEQ ID NO: 2614 - protein, 1457 aa, synthetic construct
  REGION 1..1457: note = Variant of human B-domain deleted Factor VIII
MQIELSTCFFLCLLRFCFSATRRYYLGAVELSWDYMQSDLGELPVDARFPPRVPKSFPFNTSVVYKKTLFVEFTDHLFNIAKPRPPWMGLLGPTIQAEVYDTVVITLKNMASHPVSLHAVGVSYWKASEGAEYDDQTSQREKEDDKVFPGGSHTYVWQVLKENGPMASDPLCLTYSYLSHVDLVKDLNSGLIGALLVCREGSLAKEKTQTLHKFILLFAVFDEGKSWHSETKNSLMQDRDAASARAWPKMHTVNGYVNRSLPGLIGCHRKSVYWHVIGMGTTPEVHSIFLEGHTFLVRNHRQASLEISPITFLTAQTLLMDLGQFLLFCHISSHQHDGMEAYVKVDSCPEEPQLRMKNNEEAEDYDDDLTDSEMDVVRFDDDNSPSFIQIRSVAKKHPKTWVHYIAAEEEDWDYAPLVLAPDDRSYKSQYLNNGPQRIGRKYKKVRFMAYTDETFKTREAIQHESGILGPLLYGEVGDTLLIIFKNQASRPYNIYPHGITDVRPLYSRRLPKGVKHLKDFPILPGEIFKYKWTVTVEDGPTKSDPRCLTRYYSSFVNMERDLASGLIGPLLICYKESVDQRGNQIMSDKRNVILFSVFDENRSWYLTENIQRFLPNPAGVQLEDPEFQASNIMHSINGYVFDSLQLSVCLHEVAYWYILSIGAQTDFLSVFFSGYTFKHKMVYEDTLTLFPFSGETVFMSMENPGLWILGCHNSDFRNRGMTALLKVSSCDKNTGDYYEDSYEDISAYLNSKNNAIEPRSFSQNPPVLKRHQREITRTTLQSDQEEIDYDDTISVEMKKEDFDIYDEDENQSPRSFQKKTRHYFIAAVERLWDYGMSSSPHVLRNRAQSGSVPQFKKVVFQEFTDGSFTQPLYRGELNEHLGLLGPYIRAEVEDNIMVTFRNQASRPYSFYSSLISYEEDQRQGAEPRKNFVKPNETKTYFWKVQHHMAPTKDEFDCKAWAYFSDVDLEKDVHSGLIGPLLVCHTNTLNPAHGRQVTVQEFALFFTIFDETKSWYFTENMERNCRAPCNIQMEDPTFKENYRFHAINGYIMDTLPGLVMAQDQRIRWYLLSMGSNENIHSIHFSGHVFTVRKKEEYKMALYNLYPGVFETVEMLPSKAGIWRVECLIGEHLHAGMSTLFLVYSNKCQTPLGMASGHIRDFQITASGQYGQWAPKLARLHYSGSINAWSTKEPFSWIKVDLLAPMIIHGIKTQGARQKFSSLYISQFIIMYSLDGKKWQTYRGNSTGTLMVFFGNVDSSGIKHNIFNPPIIARYIRLHPTHYSIRSTLRMELMGCDLNSCSMPLGMESKAISDAQITASSYFTNMFATWSPSKARLHLQGRSNAWRPQVNNPKEWLQVDFQKTMKVTGVTTQGVKSLLTSMYVKEFLISSSQDGHQWTLFFQNGKVKVFQGNQDSFTPVVNSLDPPLLTRYLRIHPQSWVHQIALRMEVLGCEAQDLY

SEQ ID NO: 2615 - DNA, 4371 bp, synthetic construct
  misc_feature 1..4371: note = Variant of human B-domain deleted Factor VIII
  source 1..4371: mol_type = other DNA
atgcagattgaactgtctacctgcttcttcctctgtttgctgaggttctgctttagcgccactagacggtactaccttggcgctgtggagctgtcctgggactatatgcagagtgatttgggagagcttcccgtcgacgcacgatttcctcctcgcgttccaaagtcatttcccttcaacacaagcgtggtgtacaagaagacgctcttcgtcgaattcaccgatcacctgttcaatatcgccaaacccagaccaccatggatgggtcttttggggcctaccatacaagcggaggtgtatgacacagttgttatcactctcaagaacatggcttctcatccggtaagtcttcacgcagtgggcgtgtcctactggaaagcttcagaaggagccgagtatgatgatcagacatcccagagggagaaagaagacgacaaggtatttccaggtgggtctcatacctatgtgtggcaagtgctcaaagagaatggccctatggcaagcgatccgctctgtttgacttacagctacctttcacacgttgacctcgtcaaggacctcaactccgggttgattggagccttgttggtatgcagggaaggatctcttgccaaagagaagacacagaccctccacaagtttatccttctctttgctgtgttcgatgagggcaaaagttggcatagcgaaacgaagaattccctcatgcaggatcgcgacgcagccagcgccagagcttggcccaagatgcacactgtgaacggatatgtcaataggtcacttcctggcttgattgggtgtcatcggaaaagtgtctactggcacgtgatcggaatggggacaacaccagaggtccactccatatttctcgaaggccataccttccttgttcgaaaccacagacaggcatccttggagatctctcccattacctttctcactgcccaaacgctccttatggacttgggtcagttccttctcttctgccatatcagctcacaccagcatgatggtatggaagcttatgtgaaagtcgacagttgtcctgaggagccacagttgcgcatgaagaataatgaagaagccgaggattacgacgacgatctcaccgattctgagatggacgtggtgaggtttgatgacgacaactctccctccttcattcaaatccggagcgtggcgaagaaacaccccaagacttgggtccactatatagcggcggaagaggaggattgggattacgctcctcttgtattggcaccagatgaccgctcatacaaaagccagtacctcaacaacggaccgcagagaattggccggaagtataagaaagtgcgatttatggcctatacagacgaaacctttaagacaagggaggccatccagcatgagagtgggattttgggacctcttctttacggcgaagttggtgataccctcctcatcatcttcaagaatcaagcttctcgcccctataacatttacccacacgggatcactgacgttaggcctttgtatagcagaagacttcccaaaggcgtgaagcatctcaaagacttccccattttgccaggcgagatctttaagtacaaatggaccctgacagtggaagatggaccgactaaatcagaccctcgatgccttacgcggtactattcctccttcgtgaatatggagagagatttggcaagcggactcataggaccactcctcatctgttacaaggaatctgtagaccagaggggtaaccagattatgagtgataaacgcaatgtgatcctttttagcgtcttcgacgagaaccggtcctggtacttgaccgagaatatacaaaggttccttcccaaccccgcaggcgttcagttggaagaccctgagtttcaggccagcaatattatgcactcaatcaacggctatgtgtttgatagtctccagctttctgtttgcctccatgaagtagcctattggtacatcttgtcaattggtgctcaaacagacttcctctccgtcttcttctccggctacacctttaagcacaagatggtgtatgaggacactctcacactctttccattttctggagaaaccgtgttcatgagcatggagaatccgggcctttggatcttgggttgccacaacagtgattttcgcaatcggggaatgactgctctcctcaaagtcagcagctgtgataagaacacaggcgactattacgaagattcttacgaggacataagtgcctacttgttgtccaagaataacgccattgagcccagatcattctcccagaatcctcccgtgcttaaaaggcatcagcgcgaaatcaccagaactactcttcagtctgatcaagaggagattgactatgacgacaccataagcgtggaaatgaagaaggaggatttcgatatctatgacgaagatgagaaccagtctccgcggagctttcagaagaagacgcgacactacttcattgcagcagtcgaaaggctttgggactacggtatgtcatcatcccctcatgtgttgcgcaatagagctcagagtggaagtgttccacagttcaagaaagtcgtctttcaagagtttacagatggcagcttcacacagcctctctatcggggcgagcttaacgaacatttgggactccttggtccctatatccgagccgaagtggaggacaacattatggttacctttaggaatcaagcctctcgcccctacagcttctactcctccctcatcagttatgaggaggatcagagacaaggcgctgaaccacggaagaactttgtgaaaccgaatgagacgaagacctacttctggaaagtacagcaccacatggcccccacaaaagacgaattcgattgcaaagcatgggcgtatttttcagacgttgacttggagaaagatgtacattcaggacttattggtcctttgttggtgtgtcacactaacactctcaatccagcccatggcaggcaggtgacagtccaggaattcgctcttttctttaccatctttgatgagaccaagtcctggtacttcacggaaaacatggagcgcaattgcagagccccctgtaacatacagatggaggaccctacctttaaggaaaattatcggttccacgcaatcaacggatacattatggatacactccctggccttgtgatggctcaggaccaacgaatcaggtggtacctcctcagcatgggttctaatgagaacatacactccattcacttttcaggacatgtgttcactgtccggaagaaagaagagtataagatggccctctacaatttgtatccaggcgtgtttgagaccgttgaaatgcttccctctaaagctggcatctggagagtagagtgcttgatcggagaacatcttcacgcaggtatgagcaccttgttcctcgtgtacagcaacaaatgtcagaccccacttggcatggccagtggacacattcgcgactttcagatcacagcatctggccagtatggacaatgggcaccaaagttggctcgcctccattactccggtagcataaatgcgtggtccactaaagaacctttcagctggattaaggtcgatcttcttgcccccatgatcatccacggcattaagacacagggagcgaggcagaaattctcctccctctacatctcacagttcattattatgtatagtttggacggcaagaagtggcaaacttatagaggtaacagtactggaacactcatggtgttcttcggcaacgttgatagctctggcatcaaacacaacatctttaatcctcccataatagctcggtacatcagattgcatccgacccactacagcattaggagtacactccgaatggagcttatgggttgcgacttgaattcctgttcaatgccactcggaatggagtctaaagccatctctgatgcacagataaccgccagtagctactttacgaacatgtttgctacgtggtcaccctctaaggcaaggcttcatttgcaaggccggtctaatgcctggagacctcaggtgaacaacccgaaagaatggctccaggtggactttcagaagaccatgaaagtaacaggtgtcactactcagggagttaagtccttgctcaccagcatgtatgtgaaggagttccttatttcctcatcacaagatggccaccagtggaccctcttctttcagaatggtaaggtcaaagtgtttcagggcaatcaagacagcttcacacccgtggtgaacagtcttgatcctccactcttgacacgataccttcgaatccatccacagtcttgggttcaccagattgcattgcgcatggaagtacttggatgcgaggctcaggacctctac

SEQ ID NO: 2616 - protein, 1457 aa, synthetic construct
  REGION 1..1457: note = Variant of human B-domain deleted Factor VIII
MQIELSTCFFLCLLRFCFSATRRYYLGAVELSWDYMQSDLGELPVDARFPPRVPKSFPFNTSVVYKKTLFVEFTDHLFNIAKPRPPWMGLLGPTIQAEVYDTVVITLKNMASHPVSLHAVGVSYWKASEGAEYDDQTSQREKEDDKVFPGGSHTYVWQVLKENGPMASDPLCLTYSYLSHVDLVKDLNSGLIGALLVCREGSLAKEKTQTLHKFILLFAVFDEGKSWHSETKNSLMQDRDAASARAWPKMHTVNGYVNRSLPGLIGCHRKSVYWHVIGMGTTPEVHSIFLEGHTFLVRNHRQASLEISPITFLTAQTLLMDLGQFLLFCHISSHQHDGMEAYVKVDSCPEEPQLRMKNNEEAEDYDDDLTDSEMDVVRFDDDNSPSFIQIRSVAKKHPKTWVHYIAAEEEDWDYAPLVLAPDDRSYKSQYLNNGPQRIGRKYKKVRFMAYTDETFKTREAIQHESGILGPLLYGEVGDTLLIIFKNQASRPYNIYPHGITDVRPLYSRRLPKGVKHLKDFPILPGEIFKYKWTLTVEDGPTKSDPRCLTRYYSSFVNMERDLASGLIGPLLICYKESVDQRGNQIMSDKRNVILFSVFDENRSWYLTENIQRFLPNPAGVQLEDPEFQASNIMHSINGYVFDSLQLSVCLHEVAYWYILSIGAQTDFLSVFFSGYTFKHKMVYEDTLTLFPFSGETVFMSMENPGLWILGCHNSDFRNRGMTALLKVSSCDKNTGDYYEDSYEDISAYLLSKNNAIEPRSFSQNPPVLKRHQREITRTTLQSDQEEIDYDDTISVEMKKEDFDIYDEDENQSPRSFQKKTRHYFIAAVERLWDYGMSSSPHVLRNRAQSGSVPQFKKVVFQEFTDGSFTQPLYRGELNEHLGLLGPYIRAEVEDNIMVTFRNQASRPYSFYSSLISYEEDQRQGAEPRKNFVKPNETKTYFWKVQHHMAPTKDEFDCKAWAYFSDVDLEKDVHSGLIGPLLVCHTNTLNPAHGRQVTVQEFALFFTIFDETKSWYFTENMERNCRAPCNIQMEDPTFKENYRFHAINGYIMDTLPGLVMAQDQRIRWYLLSMGSNENIHSIHFSGHVFTVRKKEEYKMALYNLYPGVFETVEMLPSKAGIWRVECLIGEHLHAGMSTLFLVYSNKCQTPLGMASGHIRDFQITASGQYGQWAPKLARLHYSGSINAWSTKEPFSWIKVDLLAPMIIHGIKTQGARQKFSSLYISQFIIMYSLDGKKWQTYRGNSTGTLMVFFGNVDSSGIKHNIFNPPIIARYIRLHPTHYSIRSTLRMELMGCDLNSCSMPLGMESKAISDAQITASSYFTNMFATWSPSKARLHLQGRSNAWRPQVNNPKEWLQVDFQKTMKVTGVTTQGVKSLLTSMYVKEFLISSSQDGHQWTLFFQNGKVKVFQGNQDSFTPVVNSLDPPLLTRYLRIHPQSWVHQIALRMEVLGCEAQDLY

SEQ ID NO: 2617 - DNA, 4371 bp, synthetic construct
  misc_feature 1..4371: note = Variant of human B-domain deleted Factor VIII
  source 1..4371: mol_type = other DNA
atgcagattgaactgtctacctgcttcttcctctgtttgctgaggttctgctttagcgccactagacggtactaccttggcgctgtggagctgtcctgggactatatgcagagtgatttgggagagcttcccgtcgacgcacgatttcctcctcgcgttccaaagtcatttcccttcaacacaagcgtggtgtacaagaagacgctcttcgtcgaattcaccgatcacctgttcaatatcgccaaacccagaccaccatggatgggtcttttggggcctaccatacaagcggaggtgtatgacacagttgttatcactctcaagaacatggcttctcatccggtaagtcttcacgcagtgggcgtgtcctactggaaagcttcagaaggagccgagtatgatgatcagacatcccagagggagaaagaagacgacaaggtatttccaggtgggtctcatacctatgtgtggcaagtgctcaaagagaatggccctatggcaagcgatccgctctgtttgacttacagctacctttcacacgttgacctcgtcaaggacctcaactccgggttgattggagccttgttggtatgcagggaaggatctcttgccaaagagaagacacagaccctccacaagtttatccttctctttgctgtgttcgatgagggcaaaagttggcatagcgaaacgaagaattccctcatgcaggatcgcgacgcagccagcgccagagcttggcccaagatgcacactgtgaacggatatgtcaataggtcacttcctggcttgattgggtgtcatcggaaaagtgtctactggcacgtgatcggaatggggacaacaccagaggtccactccatatttctcgaaggccataccttccttgttcgaaaccacagacaggcatccttggagatctctcccattacctttctcactgcccaaacgctccttatggacttgggtcagttccttctcttctgccatatcagctcacaccagcatgatggtatggaagcttatgtgaaagtcgacagttgtcctgaggagccacagttgcgcatgaagaataatgaagaagccgaggattacgacgacgatctcaccgattctgagatggacgtggtgaggtttgatgacgacaactctccctccttcattcaacctcggagcgtggcgaagaaacaccccaagacttgggtccactatatagcggcggaagaggaggattgggattacgctcctcttgtattggcaccagatgaccgctcatacaaaagccagtacctcaacaacggaccgcagagaattggccggaagtataagaaagtgcgatttatggcctatacagacgaaacctttaagacaagggaggccatccagcatgagagtgggattttgggacctcttctttacggcgaagttggtgataccctcctcatcatcttcaagaatcaagcttctcgcccctataacatttacccacacgggatcactgacgttaggcctttgtatagcagaagacttcccaaaggcgtgaagcatctcaaagacttccccattttgccaggcgagatctttaagtacaaatggaccgtcacagtggaagatggaccgactaaatcagaccctcgatgccttacgcggtactattcctccttcgtgaatatggagagagatttggcaagcggactcataggaccactcctcatctgttacaaggaatctgtagaccagaggggtaaccagattatgagtgataaacgcaatgtgatcctttttagcgtcttcgacgagaaccggtcctggtacttgaccgagaatatacaaaggttccttcccaaccccgcaggcgttcagttggaagaccctgagtttcaggccagcaatattatgcactcaatcaacggctatgtgtttgatagtctccagctttctgtttgcctccatgaagtagcctattggtacatcttgtcaattggtgctcaaacagacttcctctccgtcttcttctccggctacacctttaagcacaagatggtgtatgaggacactctcacactctttccattttctggagaaaccgtgttcatgagcatggagaatccaggcctttggatcttgggttgccacaacagtgattttcgcaatcggggaatgactgctctcctcaaagtcagcagctgtgataagaacacaggcgactattacgaagattcttacgaggacataagtgcctacttgttgtccaagaataacgccattgagcccagatcattctcccagaatcctcccgtgcttaaaaggcatcagcgcgaaatcaccagaactactcttcagtctgatcaagaggagattgactatgacgacaccataagcgtggaaatgaagaaggaggatttcgatatctatgacgaagatgagaaccagtctccgcggagctttcagaagaagacgcgacactacttcattgcagcagtcgaaaggctttgggactacggtatgtcatcatcccctcatgtgttgcgcaatagagctcagagtggaagtgttccacagttcaagaaagtcgtctttcaagagtttacagatggcagcttcacacagcctctctatcggggcgagcttaacgaacatttgggactccttggtccctatatccgagccgaagtggaggacaacattatggttacctttaggaatcaagcctctcgcccctacagcttctactcctccctcatcagttatgaggaggatcagagacaaggcgctgaaccacggaagaactttgtgaaaccgaatgagacgaagacctacttctggaaagtacagcaccacatggcccccacaaaagacgaattcgattgcaaagcatgggcgtatttttcagacgttgacttggagaaagatgtacattcaggacttattggtcctttgttggtgtgtcacactaacactctcaatccagcccatggcaggcaggtgacagtccaggaattcgctcttttctttaccatctttgatgagaccaagtcctggtacttcacggaaaacatggagcgcaattgcagagccccctgtaacatacagatggaggaccctacctttaaggaaaattatcggttccacgcaatcaacggatacattatggatacactccctggccttgtgatggctcaggaccaacgaatcaggtggtacctcctcagcatgggttctaatgagaacatacactccattcacttttcaggacatgtgttcactgtccggaagaaagaagagtataagatggccctctacaatttgtatccaggcgtgtttgagaccgttgaaatgcttccctctaaagctggcatctggagagtagagtgcttgatcggagaacatcttcacgcaggtatgagcaccttgttcctcgtgtacagcaacaaatgtcagaccccacttggcatggccagtggacacattcgcgactttcagatcacagcatctggccagtatggacaatgggccccaaagttggctcgcctccattactccggtagcataaatgcgtggtccactaaagaacctttcagctggattaaggtcgatcttcttgcccccatgatcatccacggcattaagacacagggagcgaggcagaaattctcctccctctacatctcacagttcattattatgtatagtttggacggcaagaagtggcaaacttatagaggtaacagtactggaacactcatggtgttcttcggcaacgttgatagctctggcatcaaacacaacatctttaatcctcccataatagctcggtacatcagattgcatccgacccactacagcattaggagtacactccgaatggagcttatgggttgcgacttgaattcctgttcaatgccactcggaatggagtctaaagccatctctgatgcacagataaccgccagtagctactttacgaacatgtttgctacgtggtcaccctctaaggcaaggcttcatttgcaaggccggtctaatgcctggagacctcaggtgaacaacccgaaagaatggctccaggtggactttcagaagaccatgaaagtaacaggtgtcactactcagggagttaagtccttgctcaccagcatgtatgtgaaggagttccttatttcctcatcacaagatggccaccagtggaccctcttctttcagaatggtaaggtcaaagtgtttcagggcaatcaagacagcttcacacccgtggtgaacagtcttgatcctccactcttgacacgataccttcgaatccatccacagtcttgggttcaccagattgcattgcgcatggaagtacttggatgcgaggctcaggacctctac

SEQ ID NO: 2618 - protein, 1457 aa, synthetic construct
  REGION 1..1457: note = Variant of human B-domain deleted Factor VIII
MQIELSTCFFLCLLRFCFSATRRYYLGAVELSWDYMQSDLGELPVDARFPPRVPKSFPFNTSVVYKKTLFVEFTDHLFNIAKPRPPWMGLLGPTIQAEVYDTVVITLKNMASHPVSLHAVGVSYWKASEGAEYDDQTSQREKEDDKVFPGGSHTYVWQVLKENGPMASDPLCLTYSYLSHVDLVKDLNSGLIGALLVCREGSLAKEKTQTLHKFILLFAVFDEGKSWHSETKNSLMQDRDAASARAWPKMHTVNGYVNRSLPGLIGCHRKSVYWHVIGMGTTPEVHSIFLEGHTFLVRNHRQASLEISPITFLTAQTLLMDLGQFLLFCHISSHQHDGMEAYVKVDSCPEEPQLRMKNNEEAEDYDDDLTDSEMDVVRFDDDNSPSFIQPRSVAKKHPKTWVHYIAAEEEDWDYAPLVLAPDDRSYKSQYLNNGPQRIGRKYKKVRFMAYTDETFKTREAIQHESGILGPLLYGEVGDTLLIIFKNQASRPYNIYPHGITDVRPLYSRRLPKGVKHLKDFPILPGEIFKYKWTVTVEDGPTKSDPRCLTRYYSSFVNMERDLASGLIGPLLICYKESVDQRGNQIMSDKRNVILFSVFDENRSWYLTENIQRFLPNPAGVQLEDPEFQASNIMHSINGYVFDSLQLSVCLHEVAYWYILSIGAQTDFLSVFFSGYTFKHKMVYEDTLTLFPFSGETVFMSMENPGLWILGCHNSDFRNRGMTALLKVSSCDKNTGDYYEDSYEDISAYLLSKNNAIEPRSFSQNPPVLKRHQREITRTTLQSDQEEIDYDDTISVEMKKEDFDIYDEDENQSPRSFQKKTRHYFIAAVERLWDYGMSSSPHVLRNRAQSGSVPQFKKVVFQEFTDGSFTQPLYRGELNEHLGLLGPYIRAEVEDNIMVTFRNQASRPYSFYSSLISYEEDQRQGAEPRKNFVKPNETKTYFWKVQHHMAPTKDEFDCKAWAYFSDVDLEKDVHSGLIGPLLVCHTNTLNPAHGRQVTVQEFALFFTIFDETKSWYFTENMERNCRAPCNIQMEDPTFKENYRFHAINGYIMDTLPGLVMAQDQRIRWYLLSMGSNENIHSIHFSGHVFTVRKKEEYKMALYNLYPGVFETVEMLPSKAGIWRVECLIGEHLHAGMSTLFLVYSNKCQTPLGMASGHIRDFQITASGQYGQWAPKLARLHYSGSINAWSTKEPFSWIKVDLLAPMIIHGIKTQGARQKFSSLYISQFIIMYSLDGKKWQTYRGNSTGTLMVFFGNVDSSGIKHNIFNPPIIARYIRLHPTHYSIRSTLRMELMGCDLNSCSMPLGMESKAISDAQITASSYFTNMFATWSPSKARLHLQGRSNAWRPQVNNPKEWLQVDFQKTMKVTGVTTQGVKSLLTSMYVKEFLISSSQDGHQWTLFFQNGKVKVFQGNQDSFTPVVNSLDPPLLTRYLRIHPQSWVHQIALRMEVLGCEAQDLY

SEQ ID NO: 2619 - DNA, 4371 bp, synthetic construct
  misc_feature 1..4371: note = Variant of human B-domain deleted Factor VIII
  source 1..4371: mol_type = other DNA
atgcagattgaactgtctacctgcttcttcctctgtttgctgaggttctgctttagcgccactagacggtactaccttggcgctgtggagctgtcctgggactatatgcagagtgatttgggagagcttcccgtcgacgcacgatttcctcctcgcgttccaaagtcatttcccttcaacacaagcgtggtgtacaagaagacgctcttcgtcgaattcaccgatcacctgttcaatatcgccaaacccagaccaccatggatgggtcttttggggcctaccatacaagcggaggtgtatgacacagttgttatcactctcaagaacatggcttctcatccggtaagtcttcacgcagtgggcgtgtcctactggaaagcttcagaaggagccgagtatgatgatcagacatcccagagggagaaagaagacgacaaggtatttccaggtgggtctcatacctatgtgtggcaagtgctcaaagagaatggccctatggcaagcgatccgctctgtttgacttacagctacctttcacacgttgacctcgtcaaggacctcaactccgggttgattggagccttgttggtatgcagggaaggatctcttgccaaagagaagacacagaccctccacaagtttatccttctctttgctgtgttcgatgagggcaaaagttggcatagcgaaacgaagaattccctcatgcaggatcgcgacgcagccagcgccagagcttggcccaagatgcacactgtgaacggatatgtcaataggtcacttcctggcttgattgggtgtcatcggaaaagtgtctactggcacgtgatcggaatggggacaacaccagaggtccactccatatttctcgaaggccataccttccttgttcgaaaccacagacaggcatccttggagatctctcccattacctttctcactgcccaaacgctccttatggacttgggtcagttccttctcttctgccatatcagctcacaccagcatgatggtatggaagcttatgtgaaagtcgacagttgtcctgaggagccacagttgcgcatgaagaataatgaagaagccgaggattacgacgacgatctcaccgattctgagatggacgtggtgaggtttgatgacgacaactctccctccttcattcaaatccggagcgtggcgaagaaacaccccaagacttgggtccactatatagcggcggaagaggaggattgggattacgctcctcttgtattggcaccagatgaccgctcatacaaaagccagtacctcaacaacggaccgcagagaattggccggaagtataagaaagtgcgatttatggcctatacagacgaaacctttaagacaagggaggccatccagcatgagagtgggattttgggacctcttctttacggcgaagttggtgataccctcctcatcatcttcaagaatcaagcttctcgcccctataacatttacccacacgggatcactgacgttaggcctttgtatagcagaagacttcccaaaggcgtgaagcatctcaaagacttccccattttgccaggcgagatctttaagtacaaatggaccgtcacagtggaagatggaccgactaaatcagaccctcgatgccttacgcggtactattcctccttcgtgaatatggagagagatttggcaagcggactcataggaccactcctcatctgttacaaggaatctgtagaccagaggggtaaccagattatgagtgataaacgcaatgtgatcctttttagcgtcttcgacgagaaccggtcctggtacttgaccgagaatatacaaaggttccttcccaaccccgcaggcgttcagttggaagaccctgagtttcaggccagcaatattatgcactcaatcaacggctatgtgtttgatagtctccagctttctgtttgcctccatgaagtagcctattggtacatcttgtcaattggtgctcaaacagacttcctctccgtcttcttctccggctacacctttaagcacaagatggtgtatgaggacactctcacactctttccattttctggagaaaccgtgttcatgagcatggagaatccaggcctttggatcttgggttgccacaacagtgattttcgcaatcggggaatgactgctctcctcaaagtcagcagctgtgataagaacacaggcgactattacgaagattcttacgaggacataagtgcctacttgttgtccaagaataacgccattgagcccagatcattctcccagaatcctcccgtgcttaaaaggcatcagcgcgaaatcaccagaactactcttcagtctgatcaagaggagattgactatgacgacaccataagcgtggaaatgaagaaggaggatttcgatatctcggacgaagatgagaaccagtctccgcggagctttcagaagaagacgcgacactacttcattgcagcagtcgaaaggctttgggactacggtatgtcatcatcccctcatgtgttgcgcaatagagctcagagtggaagtgttccacagttcaagaaagtcgtctttcaagagtttacagatggcagcttcacacagcctctctatcggggcgagcttaacgaacatttgggactccttggtccctatatccgagccgaagtggaggacaacattatggttacctttaggaatcaagcctctcgcccctacagcttctactcctccctcatcagttatgaggaggatcagagacaaggcgctgaaccacggaagaactttgtgaaaccgaatgagacgaagacctacttctggaaagtacagcaccacatggcccccacaaaagacgaattcgattgcaaagcatgggcgtatttttcagacgttgacttggagaaagatgtacattcaggacttattggtcctttgttggtgtgtcacactaacactctcaatccagcccatggcaggcaggtgacagtccaggaattcgctcttttctttaccatctttgatgagaccaagtcctggtacttcacggaaaacatggagcgcaattgcagagccccctgtaacatacagatggaggaccctacctttaaggaaaattatcggttccacgcaatcaacggatacattatggatacactccctggccttgtgatggctcaggaccaacgaatcaggtggtacctcctcagcatgggttctaatgagaacatacactccattcacttttcaggacatgtgttcactgtccggaagaaagaagagtataagatggccctctacaatttgtatccaggcgtgtttgagaccgttgaaatgcttccctctaaagctggcatctggagagtagagtgcttgatcggagaacatcttcacgcaggtatgagcaccttgttcctcgtgtacagcaacaaatgtcagaccccacttggcatggccagtggacacattcgcgactttcagatcacagcatctggccagtatggacaatgggccccaaagttggctcgcctccattactccggtagcataaatgcgtggtccactaaagaacctttcagctggattaaggtcgatcttcttgcccccatgatcatccacggcattaagacacagggagcgaggcagaaattctcctccctctacatctcacagttcattattatgtatagtttggacggcaagaagtggcaaacttatagaggtaacagtactggaacactcatggtgttcttcggcaacgttgatagctctggcatcaaacacaacatctttaatcctcccataatagctcggtacatcagattgcatccgacccactacagcattaggagtacactccgaatggagcttatgggttgcgacttgaattcctgttcaatgccactcggaatggagtctaaagccatctctgatgcacagataaccgccagtagctactttacgaacatgtttgctacgtggtcaccctctaaggcaaggcttcatttgcaaggccggtctaatgcctggagacctcaggtgaacaacccgaaagaatggctccaggtggactttcagaagaccatgaaagtaacaggtgtcactactcagggagttaagtccttgctcaccagcatgtatgtgaaggagttccttatttcctcatcacaagatggccaccagtggaccctcttctttcagaatggtaaggtcaaagtgtttcagggcaatcaagacagcttcacacccgtggtgaacagtcttgatcctccactcttgacacgataccttcgaatccatccacagtcttgggttcaccagattgcattgcgcatggaagtacttggatgcgaggctcaggacctctac

SEQ ID NO: 2620 - protein, 1457 aa, synthetic construct
  REGION 1..1457: note = Variant of human B-domain deleted Factor VIII
MQIELSTCFFLCLLRFCFSATRRYYLGAVELSWDYMQSDLGELPVDARFPPRVPKSFPFNTSVVYKKTLFVEFTDHLFNIAKPRPPWMGLLGPTIQAEVYDTVVITLKNMASHPVSLHAVGVSYWKASEGAEYDDQTSQREKEDDKVFPGGSHTYVWQVLKENGPMASDPLCLTYSYLSHVDLVKDLNSGLIGALLVCREGSLAKEKTQTLHKFILLFAVFDEGKSWHSETKNSLMQDRDAASARAWPKMHTVNGYVNRSLPGLIGCHRKSVYWHVIGMGTTPEVHSIFLEGHTFLVRNHRQASLEISPITFLTAQTLLMDLGQFLLFCHISSHQHDGMEAYVKVDSCPEEPQLRMKNNEEAEDYDDDLTDSEMDVVRFDDDNSPSFIQIRSVAKKHPKTWVHYIAAEEEDWDYAPLVLAPDDRSYKSQYLNNGPQRIGRKYKKVRFMAYTDETFKTREAIQHESGILGPLLYGEVGDTLLIIFKNQASRPYNIYPHGITDVRPLYSRRLPKGVKHLKDFPILPGEIFKYKWTVTVEDGPTKSDPRCLTRYYSSFVNMERDLASGLIGPLLICYKESVDQRGNQIMSDKRNVILFSVFDENRSWYLTENIQRFLPNPAGVQLEDPEFQASNIMHSINGYVFDSLQLSVCLHEVAYWYILSIGAQTDFLSVFFSGYTFKHKMVYEDTLTLFPFSGETVFMSMENPGLWILGCHNSDFRNRGMTALLKVSSCDKNTGDYYEDSYEDISAYLLSKNNAIEPRSFSQNPPVLKRHQREITRTTLQSDQEEIDYDDTISVEMKKEDFDISDEDENQSPRSFQKKTRHYFIAAVERLWDYGMSSSPHVLRNRAQSGSVPQFKKVVFQEFTDGSFTQPLYRGELNEHLGLLGPYIRAEVEDNIMVTFRNQASRPYSFYSSLISYEEDQRQGAEPRKNFVKPNETKTYFWKVQHHMAPTKDEFDCKAWAYFSDVDLEKDVHSGLIGPLLVCHTNTLNPAHGRQVTVQEFALFFTIFDETKSWYFTENMERNCRAPCNIQMEDPTFKENYRFHAINGYIMDTLPGLVMAQDQRIRWYLLSMGSNENIHSIHFSGHVFTVRKKEEYKMALYNLYPGVFETVEMLPSKAGIWRVECLIGEHLHAGMSTLFLVYSNKCQTPLGMASGHIRDFQITASGQYGQWAPKLARLHYSGSINAWSTKEPFSWIKVDLLAPMIIHGIKTQGARQKFSSLYISQFIIMYSLDGKKWQTYRGNSTGTLMVFFGNVDSSGIKHNIFNPPIIARYIRLHPTHYSIRSTLRMELMGCDLNSCSMPLGMESKAISDAQITASSYFTNMFATWSPSKARLHLQGRSNAWRPQVNNPKEWLQVDFQKTMKVTGVTTQGVKSLLTSMYVKEFLISSSQDGHQWTLFFQNGKVKVFQGNQDSFTPVVNSLDPPLLTRYLRIHPQSWVHQIALRMEVLGCEAQDLY

SEQ ID NO: 2621 - DNA, 4371 bp, synthetic construct
  misc_feature 1..4371: note = Variant of human B-domain deleted Factor VIII
  source 1..4371: mol_type = other DNA
atgcagattgaactgtctacctgcttcttcctctgtttgctgaggttctgctttagcgccactagacggtactaccttggcgctgtggagctgtcctgggactatatgcagagtgatttgggagagcttcccgtcgacgcacgatttcctcctcgcgttccaaagtcatttcccttcaacacaagcgtggtgtacaagaagacgctcttcgtcgaattcaccgatcacctgttcaatatcgccaaacccagaccaccatggatgggtcttttggggcctaccatacaagcggaggtgtatgacacagttgttatcactctcaagaacatggcttctcatccggtaagtcttcacgcagtgggcgtgtcctactggaaagcttcagaaggagccgagtatgatgatcagacatcccagagggagaaagaagacgacaaggtatttccaggtgggtctcatacctatgtgtggcaagtgctcaaagagaatggccctatggcaagcgatccgctctgtttgacttacagctacctttcacacgttgacctcgtcaaggacctcaactccgggttgattggagccttgttggtatgcagggaaggatctcttgccaaagagaagacacagaccctccacaagtttatccttctctttgctgtgttcgatgagggcaaaagttggcatagcgaaacgaagaattccctcatgcaggatcgcgacgcagccagcgccagagcttggcccaagatgcacactgtgaacggatatgtcaataggtcacttcctggcttgattgggtgtcatcggaaaagtgtctactggcacgtgatcggaatggggacaacaccagaggtccactccatatttctcgaaggccataccttccttgttcgaaaccacagacaggcatccttggagatctctcccattacctttctcactgcccaaacgctccttcaggacttgggtcagttccttctcttctgccatatcagctcacaccagcatgatggtatggaagcttatgtgaaagtcgacagttgtcctgaggagccacagttgcgcatgaagaataatgaagaagccgaggattacgacgacgatctcaccgattctgagatggacgtggtgaggtttgatgacgacaactctccctccttcattcaaatccggagcgtggcgaagaaacaccccaagacttgggtccactatatagcggcggaagaggaggattgggattacgctcctcttgtattggcaccagatgaccgctcatacaaaagccagtacctcaacaacggaccgcagagaattggccggaagtataagaaagtgcgatttatggcctatacagacgaaacctttaagacaagggaggccatccagcatgagagtgggattttgggacctcttctttacggcgaagttggtgataccctcctcatcatcttcaagaatcaagcttctcgcccctataacatttacccacacgggatcactgacgttaggcctttgtatagcagaagacttcccaaaggcgtgaagcatctcaaagacttccccattttgccaggcgagatctttaagtacaaatggaccgtcacagtggaagatggaccgactaaatcagaccctcgatgccttacgcggtactattcctccttcgtgaatatggagagagatttggcaagcggactcataggaccactcctcatctgttacaaggaatctgtagaccagaggggtaaccagattatgagtgataaacgcaatgtgatcctttttagcgtcttcgacgagaaccggtcctggtacttgaccgagaatatacaaaggttccttcccaaccccgcaggcgttcagttggaagaccctgagtttcaggccagcaatattatgcactcaatcaacggctatgtgtttgatagtctccagctttctgtttgcctccatgaagtagcctattggtacatcttgtcaattggtgctcaaacagacttcctctccgtcttcttctccggctacacctttaagcacaagatggtgtatgaggacactctcacactctttccattttctggagaaaccgtgttcatgagcatggagaatccaggcctttggatcttgggttgccacaacagtgattttcgcaatcggggaatgactgctctcctcaaagtcagcagctgtgataagaacacaggcgactattacgaagattcttacgaggacataagtgcctacttgttgtccaagaataacgccattgagcccagatcattctcccagaatcctcccgtgcttaaaaggcatcagcgcgaaatcaccagaactactcttcagtctgatcaagaggagattgactatgacgacaccataagcgtggaaatgaagaaggaggatttcgatatctatgacgaagatgagaaccagtctccgcggagctttcagaagaagacgcgacactacttcattgcagcagtcgaaaggctttgggactacggtatgtcatcatcccctcatgtgttgcgcaatagagctcagagtggaagtgttccacagttcaagaaagtcgtctttcaagagtttacagatggcagcttcacacagcctctctatcggggcgagcttaacgaacatttgggactccttggtccctatatccgagccgaagtggaggacaacattatggttacctttaggaatcaagcctctcgcccctacagcttctactcctccctcatcagttatgaggaggatcagagacaaggcgctgaaccacggaagaactttgtgaaaccgaatgagacgaagacctacttctggaaagtacagcaccacatggcccccacaaaagacgaattcgattgcaaagcatgggcgtatttttcagacgttgacttggagaaagatgtacattcaggacttattggtcctttgttggtgtgtcacactaacactctcaatccagcccatggcaggcaggtgacagtccaggaattcgctcttttctttaccatctttgatgagaccaagtcctggtacttcacggaaaacatggagcgcaattgcagagccccctgtaacatacagatggaggaccctacctttaaggaaaattatcggttccacgcaatcaacggatacattatggatacactccctggccttgtgatggctcaggaccaacgaatcaggtggtacctcctcagcatgggttctaatgagaacatacactccattcacttttcaggacatgtgttcactgtccggaagaaagaagagtataagatggccctctacaatttgtatccaggcgtgtttgagaccgttgaaatgcttccctctaaagctggcatctggagagtagagtgcttgatcggagaacatcttcacgcaggtatgagcaccttgttcctcgtgtacagcaacaaatgtcagaccccacttggcatggccagtggacacattcgcgactttcagatcacagcatctggccagtatggacaatgggccccaaagttggctcgcctccattactccggtagcataaatgcgtggtccactaaagaacctttcagctggattaaggtcgatcttcttgcccccatgatcatccacggcattaagacacagggagcgaggcagaaattctcctccctctacatctcacagttcattattatgtatagtttggacggcaagaagtggcaaacttatagaggtaacagtactggaacactcatggtgttcttcggcaacgttgatagctctggcatcaaacacaacatctttaatcctcccataatagctcggtacatcagattgcatccgacccactacagcattaggagtacactccgaatggagcttatgggttgcgacttgaattcctgttcaatgccactcggaatggagtctaaagccatctctgatgcacagataaccgccagtagctactttacgaacatgtttgctacgtggtcaccctctaaggcaaggcttcatttgcaaggccggtctaatgcctggagacctcaggtgaacaacccgaaagaatggctccaggtggactttcagaagaccatgaaagtaacaggtgtcactactcagggagttaagtccttgctcaccagcatgtatgtgaaggagttccttatttcctcatcacaagatggccaccagtggaccctcttctttcagaatggtaaggtcaaagtgtttcagggcaatcaagacagcttcacacccgtggtgaacagtcttgatcctccactcttgacacgataccttcgaatccatccacagtcttgggttcaccagattgcattgcgcatggaagtacttggatgcgaggctcaggacctctac

SEQ ID NO: 2622 - protein, 1457 aa, synthetic construct
  REGION 1..1457: note = Variant of human B-domain deleted Factor VIII
MQIELSTCFFLCLLRFCFSATRRYYLGAVELSWDYMQSDLGELPVDARFPPRVPKSFPFNTSVVYKKTLFVEFTDHLFNIAKPRPPWMGLLGPTIQAEVYDTVVITLKNMASHPVSLHAVGVSYWKASEGAEYDDQTSQREKEDDKVFPGGSHTYVWQVLKENGPMASDPLCLTYSYLSHVDLVKDLNSGLIGALLVCREGSLAKEKTQTLHKFILLFAVFDEGKSWHSETKNSLMQDRDAASARAWPKMHTVNGYVNRSLPGLIGCHRKSVYWHVIGMGTTPEVHSIFLEGHTFLVRNHRQASLEISPITFLTAQTLLQDLGQFLLFCHISSHQHDGMEAYVKVDSCPEEPQLRMKNNEEAEDYDDDLTDSEMDVVRFDDDNSPSFIQIRSVAKKHPKTWVHYIAAEEEDWDYAPLVLAPDDRSYKSQYLNNGPQRIGRKYKKVRFMAYTDETFKTREAIQHESGILGPLLYGEVGDTLLIIFKNQASRPYNIYPHGITDVRPLYSRRLPKGVKHLKDFPILPGEIFKYKWTVTVEDGPTKSDPRCLTRYYSSFVNMERDLASGLIGPLLICYKESVDQRGNQIMSDKRNVILFSVFDENRSWYLTENIQRFLPNPAGVQLEDPEFQASNIMHSINGYVFDSLQLSVCLHEVAYWYILSIGAQTDFLSVFFSGYTFKHKMVYEDTLTLFPFSGETVFMSMENPGLWILGCHNSDFRNRGMTALLKVSSCDKNTGDYYEDSYEDISAYLLSKNNAIEPRSFSQNPPVLKRHQREITRTTLQSDQEEIDYDDTISVEMKKEDFDIYDEDENQSPRSFQKKTRHYFIAAVERLWDYGMSSSPHVLRNRAQSGSVPQFKKVVFQEFTDGSFTQPLYRGELNEHLGLLGPYIRAEVEDNIMVTFRNQASRPYSFYSSLISYEEDQRQGAEPRKNFVKPNETKTYFWKVQHHMAPTKDEFDCKAWAYFSDVDLEKDVHSGLIGPLLVCHTNTLNPAHGRQVTVQEFALFFTIFDETKSWYFTENMERNCRAPCNIQMEDPTFKENYRFHAINGYIMDTLPGLVMAQDQRIRWYLLSMGSNENIHSIHFSGHVFTVRKKEEYKMALYNLYPGVFETVEMLPSKAGIWRVECLIGEHLHAGMSTLFLVYSNKCQTPLGMASGHIRDFQITASGQYGQWAPKLARLHYSGSINAWSTKEPFSWIKVDLLAPMIIHGIKTQGARQKFSSLYISQFIIMYSLDGKKWQTYRGNSTGTLMVFFGNVDSSGIKHNIFNPPIIARYIRLHPTHYSIRSTLRMELMGCDLNSCSMPLGMESKAISDAQITASSYFTNMFATWSPSKARLHLQGRSNAWRPQVNNPKEWLQVDFQKTMKVTGVTTQGVKSLLTSMYVKEFLISSSQDGHQWTLFFQNGKVKVFQGNQDSFTPVVNSLDPPLLTRYLRIHPQSWVHQIALRMEVLGCEAQDLY

SEQ ID NO: 2623 - DNA, 4371 bp, synthetic construct
  misc_feature 1..4371: note = Variant of human B-domain deleted Factor VIII
  source 1..4371: mol_type = other DNA
atgcagattgaactgtctacctgcttcttcctctgtttgctgaggttctgctttagcgccactagacggtactaccttggcgctgtggagctgtcctgggactatatgcagagtgatttgggagagcttcccgtcgacgcacgatttcctcctcgcgttccaaagtcatttcccttcaacacaagcgtggtgtacaagaagacgctcttcgtcgaattcaccgatcacctgttcaatatcgccaaacccagaccaccatggatgggtcttttggggcctaccatacaagcggaggtgtatgacacagttgttatcactctcaagaacatggcttctcatccggtaagtcttcacgcagtgggcgtgtcctactggaaagcttcagaaggagccgagtatgatgatcagacatcccagagggagaaagaagacgacaaggtatttccaggtgggtctcatacctatgtgtggcaagtgctcaaagagaatggccctatggcaagcgatccgctctgtttgacttacagctacctttcacacgttgacctcgtcaaggacctcaactccgggttgattggagccttgttggtatgcagggaaggatctcttgccaaagagaagacacagaccctccacaagtttatccttctctttgctgtgttcgatgagggcaaaagttggcatagcgaaacgaagaattccctcatgcaggatcgcgacgcagccagcgccagagcttggcccaagatgcacactgtgaacggatatgtcaataggtcacttcctggcttgattgggtgtcatcggaaaagtgtctactggcacgtgatcggaatggggacaacaccagaggtccactccatatttctcgaaggccataccttccttgttcgaaaccacagacaggcatccttggagatctctcccattacctttctcactgcccaaacgctccttatggacttgggtcagttccttctcttctgccatatcagctcacaccagcatgatggtatggaagcttatgtgaaagtcgacagttgtcctgaggagccacagttgcgcatgaagaataatgaagaagccgaggattacgacgacgatctcaccgattctgagatggacgtggtgaggtttgatgacgacaactctccctccttcattcaaatccggagcgtggcgaagaaacaccccaagacttgggtccactatatagcggcggaagaggaggattgggattacgctcctcttgtattggcaccagatgaccgctcatacaaaagccagtacctcaacaacggaccgcagagaattggccggaagtataagaaagtgcgatttatggcctatacagacgaaacctttaagacaagggaggccatccagcatgagagtgggattttgggacctcttctttacggcgaagttggtgataccctcctcatcatcttcaagaatcaagcttctcgcccctataacatttacccacacgggatcactgacgttaggcctttgtatagcagaagacttcccaaaggcgtgaagcatctcaaagacttccccattttgccaggcgagatctttaagtacaaatggaccgtcacagtggaagatggaccgactaaatcagaccctcgatgccttacgcggtactattcctccttcgtgaatatggagagagatttggcaagcggactcataggaccactcctcatctgttacaaggaatctgtagaccagaggggtaaccagattatgagtgataaacgcaatgtgatcctttttagcgtcttcgacgagaaccggtcctggtacttgaccgagaatatacaaaggttccttcccaaccccgcaggcgttcagttggaagaccctgagtttcaggccagcaatattatgcactcaatcaacggctatgtgtttgatagtctccagctttctgtttgcctccatgaagtagcctattggtacatcttgtcaattggtgctcaaacagacttcctctccgtcttcttctccggctacacctttaagcacaagatggtgtatgaggacactctcacactctttccattttctggagaaaccgtgttcatgagcatggagaatccaggcctttggatcttgggttgccacaacagtgattttcgcaatcggggaatgactgctctcctcaaagtcagcagctgtgatactaacacaggcgactattacgaagattcttacgaggacataagtgcctacttgttgtccaagaataacgccattgagcccagatcattctcccagaatcctcccgtgcttaaaaggcatcagcgcgaaatcaccagaactactcttcagtctgatcaagaggagattgactatgacgacaccataagcgtggaaatgaagaaggaggatttcgatatctatgacgaagatgagaaccagtctccgcggagctttcagaagaagacgcgacactacttcattgcagcagtcgaaaggctttgggactacggtatgtcatcatcccctcatgtgttgcgcaatagagctcagagtggaagtgttccacagttcaagaaagtcgtctttcaagagtttacagatggcagcttcacacagcctctctatcggggcgagcttaacgaacatttgggactccttggtccctatatccgagccgaagtggaggacaacattatggttacctttaggaatcaagcctctcgcccctacagcttctactcctccctcatcagttatgaggaggatcagagacaaggcgctgaaccacggaagaactttgtgaaaccgaatgagacgaagacctacttctggaaagtacagcaccacatggcccccacaaaagacgaattcgattgcaaagcatgggcgtatttttcagacgttgacttggagaaagatgtacattcaggacttattggtcctttgttggtgtgtcacactaacactctcaatccagcccatggcaggcaggtgacagtccaggaattcgctcttttctttaccatctttgatgagaccaagtcctggtacttcacggaaaacatggagcgcaattgcagagccccctgtaacatacagatggaggaccctacctttaaggaaaattatcggttccacgcaatcaacggatacattatggatacactccctggccttgtgatggctcaggaccaacgaatcaggtggtacctcctcagcatgggttctaatgagaacatacactccattcacttttcaggacatgtgttcactgtccggaagaaagaagagtataagatggccctctacaatttgtatccaggcgtgtttgagaccgttgaaatgcttccctctaaagctggcatctggagagtagagtgcttgatcggagaacatcttcacgcaggtatgagcaccttgttcctcgtgtacagcaacaaatgtcagaccccacttggcatggccagtggacacattcgcgactttcagatcacagcatctggccagtatggacaatgggccccaaagttggctcgcctccattactccggtagcataaatgcgtggtccactaaagaacctttcagctggattaaggtcgatcttcttgcccccatgatcatccacggcattaagacacagggagcgaggcagaaattctcctccctctacatctcacagttcattattatgtatagtttggacggcaagaagtggcaaacttatagaggtaacagtactggaacactcatggtgttcttcggcaacgttgatagctctggcatcaaacacaacatctttaatcctcccataatagctcggtacatcagattgcatccgacccactacagcattaggagtacactccgaatggagcttatgggttgcgacttgaattcctgttcaatgccactcggaatggagtctaaagccatctctgatgcacagataaccgccagtagctactttacgaacatgtttgctacgtggtcaccctctaaggcaaggcttcatttgcaaggccggtctaatgcctggagacctcaggtgaacaacccgaaagaatggctccaggtggactttcagaagaccatgaaagtaacaggtgtcactactcagggagttaagtccttgctcaccagcatgtatgtgaaggagttccttatttcctcatcacaagatggccaccagtggaccctcttctttcagaatggtaaggtcaaagtgtttcagggcaatcaagacagcttcacacccgtggtgaacagtcttgatcctccactcttgacacgataccttcgaatccatccacagtcttgggttcaccagattgcattgcgcatggaagtacttggatgcgaggctcaggacctctac

SEQ ID NO: 2624 - protein, 1457 aa, synthetic construct
  REGION 1..1457: note = Variant of human B-domain deleted Factor VIII
MQIELSTCFFLCLLRFCFSATRRYYLGAVELSWDYMQSDLGELPVDARFPPRVPKSFPFNTSVVYKKTLFVEFTDHLFNIAKPRPPWMGLLGPTIQAEVYDTVVITLKNMASHPVSLHAVGVSYWKASEGAEYDDQTSQREKEDDKVFPGGSHTYVWQVLKENGPMASDPLCLTYSYLSHVDLVKDLNSGLIGALLVCREGSLAKEKTQTLHKFILLFAVFDEGKSWHSETKNSLMQDRDAASARAWPKMHTVNGYVNRSLPGLIGCHRKSVYWHVIGMGTTPEVHSIFLEGHTFLVRNHRQASLEISPITFLTAQTLLMDLGQFLLFCHISSHQHDGMEAYVKVDSCPEEPQLRMKNNEEAEDYDDDLTDSEMDVVRFDDDNSPSFIQIRSVAKKHPKTWVHYIAAEEEDWDYAPLVLAPDDRSYKSQYLNNGPQRIGRKYKKVRFMAYTDETFKTREAIQHESGILGPLLYGEVGDTLLIIFKNQASRPYNIYPHGITDVRPLYSRRLPKGVKHLKDFPILPGEIFKYKWTVTVEDGPTKSDPRCLTRYYSSFVNMERDLASGLIGPLLICYKESVDQRGNQIMSDKRNVILFSVFDENRSWYLTENIQRFLPNPAGVQLEDPEFQASNIMHSINGYVFDSLQLSVCLHEVAYWYILSIGAQTDFLSVFFSGYTFKHKMVYEDTLTLFPFSGETVFMSMENPGLWILGCHNSDFRNRGMTALLKVSSCDTNTGDYYEDSYEDISAYLLSKNNAIEPRSFSQNPPVLKRHQREITRTTLQSDQEEIDYDDTISVEMKKEDFDIYDEDENQSPRSFQKKTRHYFIAAVERLWDYGMSSSPHVLRNRAQSGSVPQFKKVVFQEFTDGSFTQPLYRGELNEHLGLLGPYIRAEVEDNIMVTFRNQASRPYSFYSSLISYEEDQRQGAEPRKNFVKPNETKTYFWKVQHHMAPTKDEFDCKAWAYFSDVDLEKDVHSGLIGPLLVCHTNTLNPAHGRQVTVQEFALFFTIFDETKSWYFTENMERNCRAPCNIQMEDPTFKENYRFHAINGYIMDTLPGLVMAQDQRIRWYLLSMGSNENIHSIHFSGHVFTVRKKEEYKMALYNLYPGVFETVEMLPSKAGIWRVECLIGEHLHAGMSTLFLVYSNKCQTPLGMASGHIRDFQITASGQYGQWAPKLARLHYSGSINAWSTKEPFSWIKVDLLAPMIIHGIKTQGARQKFSSLYISQFIIMYSLDGKKWQTYRGNSTGTLMVFFGNVDSSGIKHNIFNPPIIARYIRLHPTHYSIRSTLRMELMGCDLNSCSMPLGMESKAISDAQITASSYFTNMFATWSPSKARLHLQGRSNAWRPQVNNPKEWLQVDFQKTMKVTGVTTQGVKSLLTSMYVKEFLISSSQDGHQWTLFFQNGKVKVFQGNQDSFTPVVNSLDPPLLTRYLRIHPQSWVHQIALRMEVLGCEAQDLY

SEQ ID NO: 2625 - DNA, 4371 bp, synthetic construct
  misc_feature 1..4371: note = Variant of human B-domain deleted Factor VIII
  source 1..4371: mol_type = other DNA
atgcagattgaactgtctacctgcttcttcctctgtttgctgaggttctgctttagcgccactagacggtactaccttggcgctgtggagctgtcctgggactatatgcagagtgatttgggagagcttcccgtcgacgcacgatttcctcctcgcgttccaaagtcatttcccttcaacacaagcgtggtgtacaagaagacgctcttcgtcgaattcaccgatcacctgttcaatatcgccaaacccagaccaccatggatgggtcttttggggcctaccatacaagcggaggtgtatgacacagttgttatcactctcaagaacatggcttctcatccggtaagtcttcacgcagtgggcgtgtcctactggaaagcttcagaaggagccgagtatgatgatcagacatcccagagggagaaagaagacgacaaggtatttccaggtgggtctcatacctatgtgtggcaagtgctcaaagagaatggccctatggcaagcgatccgctctgtttgacttacagctacctttcacacgttgacctcgtcaaggacctcaactccgggttgattggagccttgttggtatgcagggaaggatctcttgccaaagagaagacacagaccctccacaagtttatccttctctttgctgtgttcgatgagggcaaaagttggcatagcgaaacgaagaattccctcatgcaggatcgcgacgcagccagcgccagagcttggcccaagatgcacactgtgaacggatatgtcaataggtcacttcctggcttgattgggtgtcatcggaaaagtgtctactggcacgtgatcggaatggggacaacaccagaggtccactccatatttctcgaaggccataccttccttgttcgaaaccacagacaggcatccttggagatctctcccattacctttctcactgcccaaacgctccttatggacttgggtcagttccttctcttctgccatatcagctcacaccagcatgatggtatggaagcttatgtgaaagtcgacagttgtcctgaggagccacagttgcgcatgaagaataatgaagaagccgaggattacgacgacgatctcaccgattctgagatggacgtggtgaggtttgatgacgacaactctccctccttcattcaaatccggagcgtggcgaagaaacaccccaagacttgggtccactatatagcggcggaagaggaggattgggattacgctcctcttgtattggcaccagatgaccgctcatacaaaagccagtacctcaacaacggaccgcagagaattggccggaagtataagaaagtgcgatttatggcctatacagacgaaacctttaagacaagggaggccatccagcatgagagtgggattttgggacctcttctttacggcgaagttggtgataccctcctcatcatcttcaagaatcaagcttctcgcccctataacatttacccacacgggatcactgacgttaggcctttgtatagcagaagacttcccaaaggcgtgaagcatctcaaagacttccccattttgccaggcgagatctttaagtacaaatggaccgtcacagtggaagatggaccgactaaatcagaccctcgatgccttacgcggtactattcctccttcgtgaatatggagagagatttggcaagcggactcataggaccactcctcatctgttacaaggaatctgtagaccagaggggtaaccagattatgagtgataaacgcaatgtgatcctttttagcgtcttcgacgagaaccggtcctggtacttgaccgagaatatacaaaggttccttcccaaccccgcaggcgttcagttggaagaccctgagtttcaggccagcaatattatgcactcaatcaacggctatgtgtttgatagtctccagctttctgtttgcctccatgaagtagcctattggtacatcttgtcaattggtgctcaaacagacttcctctccgtcttcttctccggctacacctttaagcacaagatggtgtatgaggacactctcacactctttccattttctggagaaaccgtgttcatgagcatggagaatccaggcctttggatcttgggttgccacaacagtgattttcgcaatcggggaatgactgctctcctcaaagtcagcagctgtgataagaacacaggcgactatagtgaagattcttacgaggacataagtgcctacttgttgtccaagaataacgccattgagcccagatcattctcccagaatcctcccgtgcttaaaaggcatcagcgcgaaatcaccagaactactcttcagtctgatcaagaggagattgactatgacgacaccataagcgtggaaatgaagaaggaggatttcgatatctatgacgaagatgagaaccagtctccgcggagctttcagaagaagacgcgacactacttcattgcagcagtcgaaaggctttgggactacggtatgtcatcatcccctcatgtgttgcgcaatagagctcagagtggaagtgttccacagttcaagaaagtcgtctttcaagagtttacagatggcagcttcacacagcctctctatcggggcgagcttaacgaacatttgggactccttggtccctatatccgagccgaagtggaggacaacattatggttacctttaggaatcaagcctctcgcccctacagcttctactcctccctcatcagttatgaggaggatcagagacaaggcgctgaaccacggaagaactttgtgaaaccgaatgagacgaagacctacttctggaaagtacagcaccacatggcccccacaaaagacgaattcgattgcaaagcatgggcgtatttttcagacgttgacttggagaaagatgtacattcaggacttattggtcctttgttggtgtgtcacactaacactctcaatccagcccatggcaggcaggtgacagtccaggaattcgctcttttctttaccatctttgatgagaccaagtcctggtacttcacggaaaacatggagcgcaattgcagagccccctgtaacatacagatggaggaccctacctttaaggaaaattatcggttccacgcaatcaacggatacattatggatacactccctggccttgtgatggctcaggaccaacgaatcaggtggtacctcctcagcatgggttctaatgagaacatacactccattcacttttcaggacatgtgttcactgtccggaagaaagaagagtataagatggccctctacaatttgtatccaggcgtgtttgagaccgttgaaatgcttccctctaaagctggcatctggagagtagagtgcttgatcggagaacatcttcacgcaggtatgagcaccttgttcctcgtgtacagcaacaaatgtcagaccccacttggcatggccagtggacacattcgcgactttcagatcacagcatctggccagtatggacaatgggccccaaagttggctcgcctccattactccggtagcataaatgcgtggtccactaaagaacctttcagctggattaaggtcgatcttcttgcccccatgatcatccacggcattaagacacagggagcgaggcagaaattctcctccctctacatctcacagttcattattatgtatagtttggacggcaagaagtggcaaacttatagaggtaacagtactggaacactcatggtgttcttcggcaacgttgatagctctggcatcaaacacaacatctttaatcctcccataatagctcggtacatcagattgcatccgacccactacagcattaggagtacactccgaatggagcttatgggttgcgacttgaattcctgttcaatgccactcggaatggagtctaaagccatctctgatgcacagataaccgccagtagctactttacgaacatgtttgctacgtggtcaccctctaaggcaaggcttcatttgcaaggccggtctaatgcctggagacctcaggtgaacaacccgaaagaatggctccaggtggactttcagaagaccatgaaagtaacaggtgtcactactcagggagttaagtccttgctcaccagcatgtatgtgaaggagttccttatttcctcatcacaagatggccaccagtggaccctcttctttcagaatggtaaggtcaaagtgtttcagggcaatcaagacagcttcacacccgtggtgaacagtcttgatcctccactcttgacacgataccttcgaatccatccacagtcttgggttcaccagattgcattgcgcatggaagtacttggatgcgaggctcaggacctctac

SEQ ID NO: 2626 - protein, 1457 aa, synthetic construct
  REGION 1..1457: note = Variant of human B-domain deleted Factor VIII
MQIELSTCFFLCLLRFCFSATRRYYLGAVELSWDYMQSDLGELPVDARFPPRVPKSFPFNTSVVYKKTLFVEFTDHLFNIAKPRPPWMGLLGPTIQAEVYDTVVITLKNMASHPVSLHAVGVSYWKASEGAEYDDQTSQREKEDDKVFPGGSHTYVWQVLKENGPMASDPLCLTYSYLSHVDLVKDLNSGLIGALLVCREGSLAKEKTQTLHKFILLFAVFDEGKSWHSETKNSLMQDRDAASARAWPKMHTVNGYVNRSLPGLIGCHRKSVYWHVIGMGTTPEVHSIFLEGHTFLVRNHRQASLEISPITFLTAQTLLMDLGQFLLFCHISSHQHDGMEAYVKVDSCPEEPQLRMKNNEEAEDYDDDLTDSEMDVVRFDDDNSPSFIQIRSVAKKHPKTWVHYIAAEEEDWDYAPLVLAPDDRSYKSQYLNNGPQRIGRKYKKVRFMAYTDETFKTREAIQHESGILGPLLYGEVGDTLLIIFKNQASRPYNIYPHGITDVRPLYSRRLPKGVKHLKDFPILPGEIFKYKWTVTVEDGPTKSDPRCLTRYYSSFVNMERDLASGLIGPLLICYKESVDQRGNQIMSDKRNVILFSVFDENRSWYLTENIQRFLPNPAGVQLEDPEFQASNIMHSINGYVFDSLQLSVCLHEVAYWYILSIGAQTDFLSVFFSGYTFKHKMVYEDTLTLFPFSGETVFMSMENPGLWILGCHNSDFRNRGMTALLKVSSCDKNTGDYSEDSYEDISAYLLSKNNAIEPRSFSQNPPVLKRHQREITRTTLQSDQEEIDYDDTISVEMKKEDFDIYDEDENQSPRSFQKKTRHYFIAAVERLWDYGMSSSPHVLRNRAQSGSVPQFKKVVFQEFTDGSFTQPLYRGELNEHLGLLGPYIRAEVEDNIMVTFRNQASRPYSFYSSLISYEEDQRQGAEPRKNFVKPNETKTYFWKVQHHMAPTKDEFDCKAWAYFSDVDLEKDVHSGLIGPLLVCHTNTLNPAHGRQVTVQEFALFFTIFDETKSWYFTENMERNCRAPCNIQMEDPTFKENYRFHAINGYIMDTLPGLVMAQDQRIRWYLLSMGSNENIHSIHFSGHVFTVRKKEEYKMALYNLYPGVFETVEMLPSKAGIWRVECLIGEHLHAGMSTLFLVYSNKCQTPLGMASGHIRDFQITASGQYGQWAPKLARLHYSGSINAWSTKEPFSWIKVDLLAPMIIHGIKTQGARQKFSSLYISQFIIMYSLDGKKWQTYRGNSTGTLMVFFGNVDSSGIKHNIFNPPIIARYIRLHPTHYSIRSTLRMELMGCDLNSCSMPLGMESKAISDAQITASSYFTNMFATWSPSKARLHLQGRSNAWRPQVNNPKEWLQVDFQKTMKVTGVTTQGVKSLLTSMYVKEFLISSSQDGHQWTLFFQNGKVKVFQGNQDSFTPVVNSLDPPLLTRYLRIHPQSWVHQIALRMEVLGCEAQDLY

SEQ ID NO: 2627 - DNA, 4371 bp, synthetic construct
  misc_feature 1..4371: note = Variant of human B-domain deleted Factor VIII
  source 1..4371: mol_type = other DNA
atgcagattgaactgtctacctgcttcttcctctgtttgctgaggttctgctttagcgccactagacggtactaccttggcgctgtggagctgtcctgggactatatgcagagtgatttgggagagcttcccgtcgacgcacgatttcctcctcgcgttccaaagtcatttcccttcaacacaagcaaggtgtacaagaagacgctcttcgtcgaattcaccgatcacctgttcaatatcgccaaacccagaccaccatggatgggtcttttggggcctaccatacaagcggaggtgtatgacacagttgttatcactctcaagaacatggcttctcatccggtaagtcttcacgcagtgggcgtgtcctactggaaagcttcagaaggagccgagtatgatgatcagacatcccagagggagaaagaagacgacaaggtatttccaggtgggtctcatacctatgtgtggcaagtgctcaaagagaatggccctatggcaagcgatccgctctgtttgacttacagctacctttcacacgttgacctcgtcaaggacctcaactccgggttgattggagccttgttggtatgcagggaaggatctcttgccaaagagaagacacagaccctccacaagtttatccttctctttgctgtgttcgatgagggcaaaagttggcatagcgaaacgaagaattccctcatgcaggatcgcgacgcagccagcgccagagcttggcccaagatgcacactgtgaacggatatgtcaataggtcacttcctggcttgattgggtgtcatcggaaaagtgtctactggcacgtgatcggaatggggacaacaccagaggtccactccatatttctcgaaggccataccttccttgttcgaaaccacagacaggcatccttggagatctctcccattacctttctcactgcccaaacgctccttatggacttgggtcagttccttctcttctgccatatcagctcacaccagcatgatggtatggaagcttatgtgaaagtcgacagttgtcctgaggagccacagttgcgcatgaagaataatgaagaagccgaggattacgacgacgatctcaccgattctgagatggacgtggtgaggtttgatgacgacaactctccctccttcattcaaatccggagcgtggcgaagaaacaccccaagacttgggtccactatatagcggcggaagaggaggattgggattacgctcctcttgtattggcaccagatgaccgctcatacaaaagccagtacctcaacaacggaccgcagagaattggccggaagtataagaaagtgcgatttatggcctatacagacgaaacctttaagacaagggaggccatccagcatgagagtgggattttgggacctcttctttacggcgaagttggtgataccctcctcatcatcttcaagaatcaagcttctcgcccctataacatttacccacacgggatcactgacgttaggcctttgtatagcagaagacttcccaaaggcgtgaagcatctcaaagacttccccattttgccaggcgagatctttaagtacaaatggaccgtcacagtggaagatggaccgactaaatcagaccctcgatgccttacgcggtactattcctccttcgtgaatatggagagagatttggcaagcggactcataggaccactcctcatctgttacaaggaatctgtagaccagaggggtaaccagattatgagtgataaacgcaatgtgatcctttttagcgtcttcgacgagaaccggtcctggtacttgaccgagaatatacaaaggttccttcccaaccccgcaggcgttcagttggaagaccctgagtttcaggccagcaatattatgcactcaatcaacggctatgtgtttgatagtctccagctttctgtttgcctccatgaagtagcctattggtacatcttgtcaattggtgctcaaacagacttcctctccgtcttcttctccggctacacctttaagcacaagatggtgtatgaggacactctcacactctttccattttctggagaaaccgtgttcatgagcatggagaatccaggcctttggatcttgggttgccacaacagtgattttcgcaatcggggaatgactgctctcctcaaagtcagcagctgtgataagaacacaggcgactattacgaagattcttacgaggacataagtgcctacttgttgtccaagaataacgccattgagcccagatcattctcccagaatcctcccgtgcttaaaaggcatcagcgcgaaatcaccagaactactcttcagtctgatcaagaggagattgactatgacgacaccataagcgtggaaatgaagaaggaggatttcgatatctatgacgaagatgagaaccagtctccgcggagctttcagaagaagacgcgacactacttcattgcagcagtcgaaaggctttgggactacggtatgtcatcatcccctcatgtgttgcgcaatagagctcagagtggaagtgttccacagttcaagaaagtcgtctttcaagagtttacagatggcagcttcacacagcctctctatcggggcgagcttaacgaacatttgggactccttggtccctatatccgagccgaagtggaggacaacattatggttacctttaggaatcaagcctctcgcccctacagcttctactcctccctcatcagttatgaggaggatcagagacaaggcgctgaaccacggaagaactttgtgaaaccgaatgagacgaagacctacttctggaaagtacagcaccacatggcccccacaaaagacgaattcgattgcaaagcatgggcgtatttttcagacgttgacttggagaaagatgtacattcaggacttattggtcctttgttggtgtgtcacactaacactctcaatccagcccatggcaggcaggtgacagtccaggaattcgctcttttctttaccatctttgatgagaccaagtcctggtacttcacggaaaacatggagcgcaattgcagagccccctgtaacatacagatggaggaccctacctttaaggaaaattatcggttccacgcaatcaacggatacattatggatacactccctggccttgtgatggctcaggaccaacgaatcaggtggtacctcctcagcatgggttctaatgagaacatacactccattcacttttcaggacatgtgttcactgtccggaagaaagaagagtataagatggccctctacaatttgtatccaggcgtgtttgagaccgttgaaatgcttccctctaaagctggcatctggagagtagagtgcttgatcggagaacatcttcacgcaggtatgagcaccttgttcctcgtgtacagcaacaaatgtcagaccccacttggcatggccagtggacacattcgcgactttcagatcacagcatctggccagtatggacaatgggccccaaagttggctcgcctccattactccggtagcataaatgcgtggtccactaaagaacctttcagctggattaaggtcgatcttcttgcccccatgatcatccacggcattaagacacagggagcgaggcagaaattctcctccctctacatctcacagttcattattatgtatagtttggacggcaagaagtggcaaacttatagaggtaacagtactggaacactcatggtgttcttcggcaacgttgatagctctggcatcaaacacaacatctttaatcctcccataatagctcggtacatcagattgcatccgacccactacagcattaggagtacactccgaatggagcttatgggttgcgacttgaattcctgttcaatgccactcggaatggagtctaaagccatctctgatgcacagataaccgccagtagctactttacgaacatgtttgctacgtggtcaccctctaaggcaaggcttcatttgcaaggccggtctaatgcctggagacctcaggtgaacaacccgaaagaatggctccaggtggactttcagaagaccatgaaagtaacaggtgtcactactcagggagttaagtccttgctcaccagcatgtatgtgaaggagttccttatttcctcatcacaagatggccaccagtggaccctcttctttcagaatggtaaggtcaaagtgtttcagggcaatcaagacagcttcacacccgtggtgaacagtcttgatcctccactcttgacacgataccttcgaatccatccacagtcttgggttcaccagattgcattgcgcatggaagtacttggatgcgaggctcaggacctctac

SEQ ID NO: 2628 - protein, 1457 aa, synthetic construct
  REGION 1..1457: note = Variant of human B-domain deleted Factor VIII
MQIELSTCFFLCLLRFCFSATRRYYLGAVELSWDYMQSDLGELPVDARFPPRVPKSFPFNTSKVYKKTLFVEFTDHLFNIAKPRPPWMGLLGPTIQAEVYDTVVITLKNMASHPVSLHAVGVSYWKASEGAEYDDQTSQREKEDDKVFPGGSHTYVWQVLKENGPMASDPLCLTYSYLSHVDLVKDLNSGLIGALLVCREGSLAKEKTQTLHKFILLFAVFDEGKSWHSETKNSLMQDRDAASARAWPKMHTVNGYVNRSLPGLIGCHRKSVYWHVIGMGTTPEVHSIFLEGHTFLVRNHRQASLEISPITFLTAQTLLMDLGQFLLFCHISSHQHDGMEAYVKVDSCPEEPQLRMKNNEEAEDYDDDLTDSEMDVVRFDDDNSPSFIQIRSVAKKHPKTWVHYIAAEEEDWDYAPLVLAPDDRSYKSQYLNNGPQRIGRKYKKVRFMAYTDETFKTREAIQHESGILGPLLYGEVGDTLLIIFKNQASRPYNIYPHGITDVRPLYSRRLPKGVKHLKDFPILPGEIFKYKWTVTVEDGPTKSDPRCLTRYYSSFVNMERDLASGLIGPLLICYKESVDQRGNQIMSDKRNVILFSVFDENRSWYLTENIQRFLPNPAGVQLEDPEFQASNIMHSINGYVFDSLQLSVCLHEVAYWYILSIGAQTDFLSVFFSGYTFKHKMVYEDTLTLFPFSGETVFMSMENPGLWILGCHNSDFRNRGMTALLKVSSCDKNTGDYYEDSYEDISAYLLSKNNAIEPRSFSQNPPVLKRHQREITRTTLQSDQEEIDYDDTISVEMKKEDFDIYDEDENQSPRSFQKKTRHYFIAAVERLWDYGMSSSPHVLRNRAQSGSVPQFKKVVFQEFTDGSFTQPLYRGELNEHLGLLGPYIRAEVEDNIMVTFRNQASRPYSFYSSLISYEEDQRQGAEPRKNFVKPNETKTYFWKVQHHMAPTKDEFDCKAWAYFSDVDLEKDVHSGLIGPLLVCHTNTLNPAHGRQVTVQEFALFFTIFDETKSWYFTENMERNCRAPCNIQMEDPTFKENYRFHAINGYIMDTLPGLVMAQDQRIRWYLLSMGSNENIHSIHFSGHVFTVRKKEEYKMALYNLYPGVFETVEMLPSKAGIWRVECLIGEHLHAGMSTLFLVYSNKCQTPLGMASGHIRDFQITASGQYGQWAPKLARLHYSGSINAWSTKEPFSWIKVDLLAPMIIHGIKTQGARQKFSSLYISQFIIMYSLDGKKWQTYRGNSTGTLMVFFGNVDSSGIKHNIFNPPIIARYIRLHPTHYSIRSTLRMELMGCDLNSCSMPLGMESKAISDAQITASSYFTNMFATWSPSKARLHLQGRSNAWRPQVNNPKEWLQVDFQKTMKVTGVTTQGVKSLLTSMYVKEFLISSSQDGHQWTLFFQNGKVKVFQGNQDSFTPVVNSLDPPLLTRYLRIHPQSWVHQIALRMEVLGCEAQDLY

SEQ ID NO: 2629 - DNA, 4371 bp, synthetic construct
  misc_feature 1..4371: note = Variant of human B-domain deleted Factor VIII
  source 1..4371: mol_type = other DNA
atgcagattgaactgtctacctgcttcttcctctgtttgctgaggttctgctttagcgccactagacggtactaccttggcgctgtggagctgtcctgggactatatgcagagtgatttgggagagcttcccgtcgacgcacgatttcctcctcgcgttccaaagtcatttcccttcaacacaagcgtggtgtacaagaagacgctcttcgtcgaattcaccgatcacctgttcaatatcgccaaacccagaccaccatggatgggtcttttggggcctaccatacaagcggaggtgtatgacacagttgttatcactctcaagaacatggcttctcatccggtaagtcttcacgcagtgggcgtgtcctactggaaagcttcagaaggagccgagtatgatgatcagacatcccagagggagaaagaagacgacaaggtatttccaggtgggtctcatacctatgtgtggcaagtgctcaaagagaatggccctatggcaagcgatccgctctgtttgacttacagctacctttcacacgttgacctcgtcaaggacctcaactccgggttgattggagccttgttggtatgcagggaaggatctcttgccaaagagaagacacagaccctccacaagtttatccttctctttgctgtgttcgatgagggcaaaagttggcatagcgaaacgaagaattccctcatgcaggatcgcgacgcagccagcgccagagcttggcccaagatgcacactgtgaacggatatgtcaataggtcacttcctggcttgattgggtgtcatcggaaaagtgtctactggcacgtgatcggaatggggacaacaccagaggtccactccatatttctcgaaggccataccttccttgttcgaaaccacagacaggcatccttggagatctctcccattacctttctcactgcccaaacgctccttatggacttgggtcagttccttctcttctgccatatcagctcacaccagcatgatggtatggaagcttatgtgaaagtcgacagttgtcctgaggagccacagttgcgcatgaagaataatgaagaagccgaggattacgacgacgatctcaccgattctgagatggacgtggtgaggtttgatgacgacaactctccctccttcattcaaatccggagcgtggcgaagaaacaccccaagacttgggtccactatatagcggcggaagaggaggattgggattacgctcctcttgtattggcaccagatgaccgctcatacaaaagccagtacctcaacaacggaccgcagagaattggccggaagtataagaaagtgcgatttatggcctatacagacgaaacctttaagacaagggaggccatccagcatgagagtgggattttgggacctcttctttacggcgaagttggtgataccctcctcatcatcttcaagaatcaagcttctcgcccctataacatttacccacacgggatcactgacgttaggcctttgtatagcagaagacttcccaaaggcgtgaagcatctcaaagacttccccattttgccaggcgagatctttaagtacaaatggaccgtcacagtggaagatggaccgactaaatcagaccctcgatgccttacgcggtactattcctccttcgtgaatatggagagagatttggcaagcggactcataggaccactcctcatctgttacaaggaatctgtagaccagaggggtaaccagattatgagtgataaacgcaatgtgatcctttttagcgtcttcgacgagaaccggtcctggtacttgaccgagaatatacaaaggttccttcccaaccccgcaggcgttcagttggaagaccctgagtttcaggccagcaatattatgcactcaatcaacggctatgtgtttgatagtctccagctttctgtttgcctccatgaagtagcctattggtacatcttgtcaattggtgctcaaacagacttcctctccgtcttcttctccggctacacctttaagcacaagatggtgtatgaggacactctcacactctttccattttctggagaaaccgtgttcatgagcatggagaatccaggcctttggatcttgggttgccacaacagtgattttcgcaatcggggaatgactgctctcctcaaagtcagcagctgtgataagaacacaggcgactattacgaagattcttacgaggacataagtgcctacttgttgtccaagaataacgccattgagcccagatcattctcccagaatcctcccgtgcttaaaaggcatcagcgcgaaatcaccagaactactcttcagtctgatcaagaggagattgactatgacgacaccataagcgtggaaatgaagaagaatgatttcgatatctatgacgaagatgagaaccagtctccgcggagctttcagaagaagacgcgacactacttcattgcagcagtcgaaaggctttgggactacggtatgtcatcatcccctcatgtgttgcgcaatagagctcagagtggaagtgttccacagttcaagaaagtcgtctttcaagagtttacagatggcagcttcacacagcctctctatcggggcgagcttaacgaacatttgggactccttggtccctatatccgagccgaagtggaggacaacattatggttacctttaggaatcaagcctctcgcccctacagcttctactcctccctcatcagttatgaggaggatcagagacaaggcgctgaaccacggaagaactttgtgaaaccgaatgagacgaagacctacttctggaaagtacagcaccacatggcccccacaaaagacgaattcgattgcaaagcatgggcgtatttttcagacgttgacttggagaaagatgtacattcaggacttattggtcctttgttggtgtgtcacactaacactctcaatccagcccatggcaggcaggtgacagtccaggaattcgctcttttctttaccatctttgatgagaccaagtcctggtacttcacggaaaacatggagcgcaattgcagagccccctgtaacatacagatggaggaccctacctttaaggaaaattatcggttccacgcaatcaacggatacattatggatacactccctggccttgtgatggctcaggaccaacgaatcaggtggtacctcctcagcatgggttctaatgagaacatacactccattcacttttcaggacatgtgttcactgtccggaagaaagaagagtataagatggccctctacaatttgtatccaggcgtgtttgagaccgttgaaatgcttccctctaaagctggcatctggagagtagagtgcttgatcggagaacatcttcacgcaggtatgagcaccttgttcctcgtgtacagcaacaaatgtcagaccccacttggcatggccagtggacacattcgcgactttcagatcacagcatctggccagtatggacaatgggccccaaagttggctcgcctccattactccggtagcataaatgcgtggtccactaaagaacctttcagctggattaaggtcgatcttcttgcccccatgatcatccacggcattaagacacagggagcgaggcagaaattctcctccctctacatctcacagttcattattatgtatagtttggacggcaagaagtggcaaacttatagaggtaacagtactggaacactcatggtgttcttcggcaacgttgatagctctggcatcaaacacaacatctttaatcctcccataatagctcggtacatcagattgcatccgacccactacagcattaggagtacactccgaatggagcttatgggttgcgacttgaattcctgttcaatgccactcggaatggagtctaaagccatctctgatgcacagataaccgccagtagctactttacgaacatgtttgctacgtggtcaccctctaaggcaaggcttcatttgcaaggccggtctaatgcctggagacctcaggtgaacaacccgaaagaatggctccaggtggactttcagaagaccatgaaagtaacaggtgtcactactcagggagttaagtccttgctcaccagcatgtatgtgaaggagttccttatttcctcatcacaagatggccaccagtggaccctcttctttcagaatggtaaggtcaaagtgtttcagggcaatcaagacagcttcacacccgtggtgaacagtcttgatcctccactcttgacacgataccttcgaatccatccacagtcttgggttcaccagattgcattgcgcatggaagtacttggatgcgaggctcaggacctctac

SEQ ID NO: 2630 - protein, 1457 aa, synthetic construct
  REGION 1..1457: note = Variant of human B-domain deleted Factor VIII
MQIELSTCFFLCLLRFCFSATRRYYLGAVELSWDYMQSDLGELPVDARFPPRVPKSFPFNTSVVYKKTLFVEFTDHLFNIAKPRPPWMGLLGPTIQAEVYDTVVITLKNMASHPVSLHAVGVSYWKASEGAEYDDQTSQREKEDDKVFPGGSHTYVWQVLKENGPMASDPLCLTYSYLSHVDLVKDLNSGLIGALLVCREGSLAKEKTQTLHKFILLFAVFDEGKSWHSETKNSLMQDRDAASARAWPKMHTVNGYVNRSLPGLIGCHRKSVYWHVIGMGTTPEVHSIFLEGHTFLVRNHRQASLEISPITFLTAQTLLMDLGQFLLFCHISSHQHDGMEAYVKVDSCPEEPQLRMKNNEEAEDYDDDLTDSEMDVVRFDDDNSPSFIQIRSVAKKHPKTWVHYIAAEEEDWDYAPLVLAPDDRSYKSQYLNNGPQRIGRKYKKVRFMAYTDETFKTREAIQHESGILGPLLYGEVGDTLLIIFKNQASRPYNIYPHGITDVRPLYSRRLPKGVKHLKDFPILPGEIFKYKWTVTVEDGPTKSDPRCLTRYYSSFVNMERDLASGLIGPLLICYKESVDQRGNQIMSDKRNVILFSVFDENRSWYLTENIQRFLPNPAGVQLEDPEFQASNIMHSINGYVFDSLQLSVCLHEVAYWYILSIGAQTDFLSVFFSGYTFKHKMVYEDTLTLFPFSGETVFMSMENPGLWILGCHNSDFRNRGMTALLKVSSCDKNTGDYYEDSYEDISAYLLSKNNAIEPRSFSQNPPVLKRHQREITRTTLQSDQEEIDYDDTISVEMKKNDFDIYDEDENQSPRSFQKKTRHYFIAAVERLWDYGMSSSPHVLRNRAQSGSVPQFKKVVFQEFTDGSFTQPLYRGELNEHLGLLGPYIRAEVEDNIMVTFRNQASRPYSFYSSLISYEEDQRQGAEPRKNFVKPNETKTYFWKVQHHMAPTKDEFDCKAWAYFSDVDLEKDVHSGLIGPLLVCHTNTLNPAHGRQVTVQEFALFFTIFDETKSWYFTENMERNCRAPCNIQMEDPTFKENYRFHAINGYIMDTLPGLVMAQDQRIRWYLLSMGSNENIHSIHFSGHVFTVRKKEEYKMALYNLYPGVFETVEMLPSKAGIWRVECLIGEHLHAGMSTLFLVYSNKCQTPLGMASGHIRDFQITASGQYGQWAPKLARLHYSGSINAWSTKEPFSWIKVDLLAPMIIHGIKTQGARQKFSSLYISQFIIMYSLDGKKWQTYRGNSTGTLMVFFGNVDSSGIKHNIFNPPIIARYIRLHPTHYSIRSTLRMELMGCDLNSCSMPLGMESKAISDAQITASSYFTNMFATWSPSKARLHLQGRSNAWRPQVNNPKEWLQVDFQKTMKVTGVTTQGVKSLLTSMYVKEFLISSSQDGHQWTLFFQNGKVKVFQGNQDSFTPVVNSLDPPLLTRYLRIHPQSWVHQIALRMEVLGCEAQDLY

SEQ ID NO: 2631 - DNA, 4371 bp, synthetic construct
  misc_feature 1..4371: note = Variant of human B-domain deleted Factor VIII
  source 1..4371: mol_type = other DNA
atgcagattgaactgtctacctgcttcttcctctgtttgctgaggttctgctttagcgccactagacggtactaccttggcgctgtggagctgtcctgggactatatgcagagtgatttgggagagcttcccgtcgacgcacgatttcctcctcgcgttccaaagtcatttcccttcaacacaagcgtggtgtacaagaagacgctcttcgtcgaattcaccgatcacctgttcaatatcgccaaacccagaccaccatggatgggtcttttggggcctaccatacaagcggaggtgtatgacacagttgttatcactctcaagaacatggcttctcatccggtaagtcttcacgcagtgggcgtgtcctactggaaagcttcagaaggagccgagtatgatgatcagacatcccagagggagaaagaagacgacaaggtatttccaggtgggtctcatacctatgtgtggcaagtgctcaaagagaatggccctatggcaagcgatccgctctgtttgacttacagctacctttcacacgttgacctcgtcaaggacctcaactccgggttgattggagccttgttggtatgcagggaaggatctcttgccaaagagaagacacagaccctccacaagtttatccttctctttgctgtgttcgatgagggcaaaagttggcatagcgaaacgaagaattccctcatgcaggatcgcgacgcagccagcgccagagcttggcccaagatgcacactgtgaacggatatgtcaataggtcacttcctggcttgattgggtgtcatcggaaaagtgtctactggcacgtgatcggaatggggacaacaccagaggtccactccatatttctcgaaggccataccttccttgttcgaaaccacagacaggcatccttggagatctctcccattacctttctcactgcccaaacgctccttatggacttgggtcagttccttctcttctgccatatcagctcacaccagcatgatggtatggaagcttatgtgaaagtcgacagttgtcctgaggagccacagttgcgcatgaagaataatgaagaagccgaggattacgacgacgatctcaccgattctgagatggacgtggtgaggtttgatgacgacaactctccctccttcattcaaatccggagcgtggcgaagaaacaccccaagacttgggtccactatatagcggcggaagaggaggattgggattacgctcctcttgtattggcaccagatgaccgctcatacaaaagccagtacctcaacaacggaccgcagagaattggccggaagtataagaaagtgcgatttatggcctatacagacgaaacctttaagacaagggaggccatccagcatgagagtgggattttgggacctcttctttacggcgaagttggtgataccctcctcatcatcttcaagaatcaagcttctcgcccctataacatttacccacacgggatcactgacgttaggcctttgtatagcagaagacttcccaaaggcgtgaagcatctcaaagacttccccattttgccaggcgagatctttaagtacaaatggaccgtcacagtggaagatggaccgactaaatcagaccctcgatgccttacgcggtactattcctccttcgtgaatatggagagagatttggcaagcggactcataggaccactcctcatctgttacaaggaatctgtagaccagaggggtaaccagattatgagtgataaacgcaatgtgatcctttttagcgtcttcgacgagaaccggtcctggtacttgaccgagaatatacaaaggttccttcccaaccccgcaggcgttcagttggaagaccctgagtttcaggccagcaatattatgcactcaatcaacggctatgtgtttgatagtctccagctttctgtttgcctccatgaagtagcctattggtacatcttgtcaattggtgctcaaacagacttcctctccgtcttcttctccggctacacctttaagcacaagatggtgtatgaggacactctcacactctttccattttctggagaaaccgtgttcatgagcatggagaatccaggcctttggatcttgggttgccacaacagtgattttcgcaatcggggaatgactgctctcctcaaagtcagcagctgtgataagaacacaggcgactattacgaagattcttacgaggacataagtgcctacttgttgtccaagaataacgccattgagcccagatcattctcccagaatcctcccgtgcttaaaaggcatcagcgcgaaatcaccagaactactcttcagtctgatcaagaggagattgactatgacgacaccataagcgtggaaatgaagaaggaggatttcgatatctatgacgaagatgagaaccagtctccgcggagctttcagaagaagacgcgacactacttcattgcagcagtcgaaaggctttgggactacggtatgtcatcatcccctcatgtgttgcgcaatagagctcagagtggaagtgttccacagttcaagaaagtcgtctttcaagagtttacagatggcagcttcacacagcctctctatcggggcgagcttaacgaacatttgggactccttggtccctatatccgagccgaagtggaggacaacattatggttacctttaggaatcaagcctctcgcccctacagcttctactcctccctcatcagttatgaggaggatcagagacaaggcgctgaaccacggaagaactttgtgaaaccgaatgagacgaagacctacttctggaaagtacagcaccacatggcccccacaaaagacgaattcgattgcaaagcatgggcgtatttttcagacgttgacttggagaaagatgtacattcaggacttattggtcctttgttggtgtgtcacactaacactctcaatccagcccatggcaggcaggtgacagtccaggaattcgctcttttctttaccatctttgatgagaccaagtcctggtacttcacggaaaacatggagcgcaattgcagagccccctgtaacatacagatggaggaccctacctttaaggaaaattatcggttccacgcaatcaacggatacattatggatacactccctggccttgtgatggctcaggaccaacgaatcaggtggtacctcctcagcatgggttctaatgagaacatacactccattcacttttcaggacatgtgttcactgtccggaagaaagaagagtataagatggccctctacaatttgtatccaggcgtgtttgagaccgttgaaatgcttccctctaaagctggcatctggagagtagagtgcttgatcggagaacatcttcacgcaggtatgagcaccttgttcctcgtgtacagcaacaaatgtcagaccccacttggcatggccagtggacacattcgcgactttcagatcacagcatctggccagtatggacaatgggccccaaagttggctcgcctccattactccggtagcataaatgcgtggtccactaaagaacctttcagctggattaaggtcgatcttcttgcccccatgatcatccacggcattaagacacagggagcgaggcagaaattctcctccctctacatctcacagttcattattatgtatagtttggacggcaagaagtggcaaacttatagaggtaacagtactggaacaatgatggtgttcttcggcaacgttgatagctctggcatcaaacacaacatctttaatcctcccataatagctcggtacatcagattgcatccgacccactacagcattaggagtacactccgaatggagcttatgggttgcgacttgaattcctgttcaatgccactcggaatggagtctaaagccatctctgatgcacagataaccgccagtagctactttacgaacatgtttgctacgtggtcaccctctaaggcaaggcttcatttgcaaggccggtctaatgcctggagacctcaggtgaacaacccgaaagaatggctccaggtggactttcagaagaccatgaaagtaacaggtgtcactactcagggagttaagtccttgctcaccagcatgtatgtgaaggagttccttatttcctcatcacaagatggccaccagtggaccctcttctttcagaatggtaaggtcaaagtgtttcagggcaatcaagacagcttcacacccgtggtgaacagtcttgatcctccactcttgacacgataccttcgaatccatccacagtcttgggttcaccagattgcattgcgcatggaagtacttggatgcgaggctcaggacctctac

SEQ ID NO: 2632 - protein, 1457 aa, synthetic construct
  REGION 1..1457: note = Variant of human B-domain deleted Factor VIII
MQIELSTCFFLCLLRFCFSATRRYYLGAVELSWDYMQSDLGELPVDARFPPRVPKSFPFNTSVVYKKTLFVEFTDHLFNIAKPRPPWMGLLGPTIQAEVYDTVVITLKNMASHPVSLHAVGVSYWKASEGAEYDDQTSQREKEDDKVFPGGSHTYVWQVLKENGPMASDPLCLTYSYLSHVDLVKDLNSGLIGALLVCREGSLAKEKTQTLHKFILLFAVFDEGKSWHSETKNSLMQDRDAASARAWPKMHTVNGYVNRSLPGLIGCHRKSVYWHVIGMGTTPEVHSIFLEGHTFLVRNHRQASLEISPITFLTAQTLLMDLGQFLLFCHISSHQHDGMEAYVKVDSCPEEPQLRMKNNEEAEDYDDDLTDSEMDVVRFDDDNSPSFIQIRSVAKKHPKTWVHYIAAEEEDWDYAPLVLAPDDRSYKSQYLNNGPQRIGRKYKKVRFMAYTDETFKTREAIQHESGILGPLLYGEVGDTLLIIFKNQASRPYNIYPHGITDVRPLYSRRLPKGVKHLKDFPILPGEIFKYKWTVTVEDGPTKSDPRCLTRYYSSFVNMERDLASGLIGPLLICYKESVDQRGNQIMSDKRNVILFSVFDENRSWYLTENIQRFLPNPAGVQLEDPEFQASNIMHSINGYVFDSLQLSVCLHEVAYWYILSIGAQTDFLSVFFSGYTFKHKMVYEDTLTLFPFSGETVFMSMENPGLWILGCHNSDFRNRGMTALLKVSSCDKNTGDYYEDSYEDISAYLLSKNNAIEPRSFSQNPPVLKRHQREITRTTLQSDQEEIDYDDTISVEMKKEDFDIYDEDENQSPRSFQKKTRHYFIAAVERLWDYGMSSSPHVLRNRAQSGSVPQFKKVVFQEFTDGSFTQPLYRGELNEHLGLLGPYIRAEVEDNIMVTFRNQASRPYSFYSSLISYEEDQRQGAEPRKNFVKPNETKTYFWKVQHHMAPTKDEFDCKAWAYFSDVDLEKDVHSGLIGPLLVCHTNTLNPAHGRQVTVQEFALFFTIFDETKSWYFTENMERNCRAPCNIQMEDPTFKENYRFHAINGYIMDTLPGLVMAQDQRIRWYLLSMGSNENIHSIHFSGHVFTVRKKEEYKMALYNLYPGVFETVEMLPSKAGIWRVECLIGEHLHAGMSTLFLVYSNKCQTPLGMASGHIRDFQITASGQYGQWAPKLARLHYSGSINAWSTKEPFSWIKVDLLAPMIIHGIKTQGARQKFSSLYISQFIIMYSLDGKKWQTYRGNSTGTMMVFFGNVDSSGIKHNIFNPPIIARYIRLHPTHYSIRSTLRMELMGCDLNSCSMPLGMESKAISDAQITASSYFTNMFATWSPSKARLHLQGRSNAWRPQVNNPKEWLQVDFQKTMKVTGVTTQGVKSLLTSMYVKEFLISSSQDGHQWTLFFQNGKVKVFQGNQDSFTPVVNSLDPPLLTRYLRIHPQSWVHQIALRMEVLGCEAQDLY

SEQ ID NO: 2633 - DNA, 4371 bp, synthetic construct
  misc_feature 1..4371: note = Variant of human B-domain deleted Factor VIII
  source 1..4371: mol_type = other DNA
atgcagattgaactgtctacctgcttcttcctctgtttgctgaggttctgctttagcgccactagacggtactaccttggcgctgtggagctgtcctgggactatatgcagagtgatttgggagagcttcccgtcgacgcacgatttcctcctcgcgttccaaagtcatttcccttcaacacaagcgtggtgtacaagaagacgctcttcgtcgaattcaccgatcacctgttcaatatcgccaaacccagaccaccatggatgggtcttttggggcctaccatacaagcggaggtgtatgacacagttgttatcactctcaagaacatggcttctcatccggtaagtcttcacgcagtgggcgtgtcctactggaaagcttcagaaggagccgagtatgatgatcagacatcccagagggagaaagaagacgacaaggtatttccaggtgggtctcatacctatgtgtggcaagtgctcaaagagaatggccctatggcaagcgatccgctctgtttgacttacagctacctttcacacgttgacctcgtcaaggacctcaactccgggttgattggagccttgttggtatgcagggaaggatctcttgccaaagagaagacacagaccctccacaagtttatccttctctttgctgtgttcgatgagggcaaaagttggcatagcgaaacgaagaattccctcatgcaggatcgcgacgcagccagcgccagagcttggcccaagatgcacactgtgaacggatatgtcaataggtcacttcctggcttgattgggtgtcatcggaaaagtgtctactggcacgtgatcggaatggggacaacaccagaggtccactccatatttctcgaaggccataccttccttgttcgaaaccacagacaggcatccttggagatctctcccattacctttctcactgcccaaacgctccttatggacttgggtcagttccttctcttctgccatatcagctcacaccagcatgatggtatggaagcttatgtgaaagtcgacagttgtcctgaggagccacagttgcgcatgaagaataatgaagaagccgaggattacgacgacgatctcaccgattctgagatggacgtggtgaggtttgatgacgacaactctccctccttcattcaaatccggagcgtggcgaagaaacaccccaagacttgggtccactatatagcggcggaagaggaggattgggattacgctcctcttgtattggcaccagatgaccgctcatacaaaagccagtacctcaacaacggaccgcagagaattggccggaagtataagaaagtgcgatttatggcctatacagacgaaacctttaagacaagggaggccatccagcatgagagtgggattttgggacctcttctttacggcgaagttggtgataccctcctcatcatcttcaagaatcaagcttctcgcccctataacatttacccacacgggatcactgacgttaggcctttgtatagcagaagacttcccaaaggcgtgaagcatctcaaagacttccccattttgccaggcgagatctttaagtacaaatggaccgtcacagtggaagatggaccgactaaatcagaccctcgatgccttacgcggtactattcctccttcgtgaatatggagagagatttggcaagcggactcataggaccactcctcatctgttacaaggaatctgtagaccagaggggtaaccagattatgagtgataaacgcaatgtgatcctttttagcgtcttcgacgagaaccggtcctggtacttgaccgagaatatacaaaggttccttcccaaccccgcaggcgttcagttggaagaccctgagtttcaggccagcaatattatgcactcaatcaacggctatgtgtttgatagtctccagctttctgtttgcctccatgaagtagcctattggtacatcttgtcaattggtgctcaaacagacttcctctccgtcttcttctccggctacacctttaagcacaagatggtgtatgaggacactctcacactctttccattttctggagaaaccgtgttcatgagcatggagaatccaggcctttggatcttgggttgccacaacagtgattttcgcaatcggggaatgactgctctcctcaaagtcagcagctgtgataagaacacaggcgactattacgaagattcttacgaggacataagtgcctacttgttgtccaagaataacgccattgagcccagatcattctcccagaatcctcccgtgcttaaaaggcatcagcgcgaaatcaccagaactactcttcagtctgatcaagaggagattgactatgacgacaccataagcgtggaaatgaagaaggaggatttcgatatcctggacgaagatgagaaccagtctccgcggagctttcagaagaagacgcgacactacttcattgcagcagtcgaaaggctttgggactacggtatgtcatcatcccctcatgtgttgcgcaatagagctcagagtggaagtgttccacagttcaagaaagtcgtctttcaagagtttacagatggcagcttcacacagcctctctatcggggcgagcttaacgaacatttgggactccttggtccctatatccgagccgaagtggaggacaacattatggttacctttaggaatcaagcctctcgcccctacagcttctactcctccctcatcagttatgaggaggatcagagacaaggcgctgaaccacggaagaactttgtgaaaccgaatgagacgaagacctacttctggaaagtacagcaccacatggcccccacaaaagacgaattcgattgcaaagcatgggcgtatttttcagacgttgacttggagaaagatgtacattcaggacttattggtcctttgttggtgtgtcacactaacactctcaatccagcccatggcaggcaggtgacagtccaggaattcgctcttttctttaccatctttgatgagaccaagtcctggtacttcacggaaaacatggagcgcaattgcagagccccctgtaacatacagatggaggaccctacctttaaggaaaattatcggttccacgcaatcaacggatacattatggatacactccctggccttgtgatggctcaggaccaacgaatcaggtggtacctcctcagcatgggttctaatgagaacatacactccattcacttttcaggacatgtgttcactgtccggaagaaagaagagtataagatggccctctacaatttgtatccaggcgtgtttgagaccgttgaaatgcttccctctaaagctggcatctggagagtagagtgcttgatcggagaacatcttcacgcaggtatgagcaccttgttcctcgtgtacagcaacaaatgtcagaccccacttggcatggccagtggacacattcgcgactttcagatcacagcatctggccagtatggacaatgggccccaaagttggctcgcctccattactccggtagcataaatgcgtggtccactaaagaacctttcagctggattaaggtcgatcttcttgcccccatgatcatccacggcattaagacacagggagcgaggcagaaattctcctccctctacatctcacagttcattattatgtatagtttggacggcaagaagtggcaaacttatagaggtaacagtactggaacactcatggtgttcttcggcaacgttgatagctctggcatcaaacacaacatctttaatcctcccataatagctcggtacatcagattgcatccgacccactacagcattaggagtacactccgaatggagcttatgggttgcgacttgaattcctgttcaatgccactcggaatggagtctaaagccatctctgatgcacagataaccgccagtagctactttacgaacatgtttgctacgtggtcaccctctaaggcaaggcttcatttgcaaggccggtctaatgcctggagacctcaggtgaacaacccgaaagaatggctccaggtggactttcagaagaccatgaaagtaacaggtgtcactactcagggagttaagtccttgctcaccagcatgtatgtgaaggagttccttatttcctcatcacaagatggccaccagtggaccctcttctttcagaatggtaaggtcaaagtgtttcagggcaatcaagacagcttcacacccgtggtgaacagtcttgatcctccactcttgacacgataccttcgaatccatccacagtcttgggttcaccagattgcattgcgcatggaagtacttggatgcgaggctcaggacctctac

SEQ ID NO: 2634 - protein, 1457 aa, synthetic construct
  REGION 1..1457: note = Variant of human B-domain deleted Factor VIII
MQIELSTCFFLCLLRFCFSATRRYYLGAVELSWDYMQSDLGELPVDARFPPRVPKSFPFNTSVVYKKTLFVEFTDHLFNIAKPRPPWMGLLGPTIQAEVYDTVVITLKNMASHPVSLHAVGVSYWKASEGAEYDDQTSQREKEDDKVFPGGSHTYVWQVLKENGPMASDPLCLTYSYLSHVDLVKDLNSGLIGALLVCREGSLAKEKTQTLHKFILLFAVFDEGKSWHSETKNSLMQDRDAASARAWPKMHTVNGYVNRSLPGLIGCHRKSVYWHVIGMGTTPEVHSIFLEGHTFLVRNHRQASLEISPITFLTAQTLLMDLGQFLLFCHISSHQHDGMEAYVKVDSCPEEPQLRMKNNEEAEDYDDDLTDSEMDVVRFDDDNSPSFIQIRSVAKKHPKTWVHYIAAEEEDWDYAPLVLAPDDRSYKSQYLNNGPQRIGRKYKKVRFMAYTDETFKTREAIQHESGILGPLLYGEVGDTLLIIFKNQASRPYNIYPHGITDVRPLYSRRLPKGVKHLKDFPILPGEIFKYKWTVTVEDGPTKSDPRCLTRYYSSFVNMERDLASGLIGPLLICYKESVDQRGNQIMSDKRNVILFSVFDENRSWYLTENIQRFLPNPAGVQLEDPEFQASNIMHSINGYVFDSLQLSVCLHEVAYWYILSIGAQTDFLSVFFSGYTFKHKMVYEDTLTLFPFSGETVFMSMENPGLWILGCHNSDFRNRGMTALLKVSSCDKNTGDYYEDSYEDISAYLLSKNNAIEPRSFSQNPPVLKRHQREITRTTLQSDQEEIDYDDTISVEMKKEDFDILDEDENQSPRSFQKKTRHYFIAAVERLWDYGMSSSPHVLRNRAQSGSVPQFKKVVFQEFTDGSFTQPLYRGELNEHLGLLGPYIRAEVEDNIMVTFRNQASRPYSFYSSLISYEEDQRQGAEPRKNFVKPNETKTYFWKVQHHMAPTKDEFDCKAWAYFSDVDLEKDVHSGLIGPLLVCHTNTLNPAHGRQVTVQEFALFFTIFDETKSWYFTENMERNCRAPCNIQMEDPTFKENYRFHAINGYIMDTLPGLVMAQDQRIRWYLLSMGSNENIHSIHFSGHVFTVRKKEEYKMALYNLYPGVFETVEMLPSKAGIWRVECLIGEHLHAGMSTLFLVYSNKCQTPLGMASGHIRDFQITASGQYGQWAPKLARLHYSGSINAWSTKEPFSWIKVDLLAPMIIHGIKTQGARQKFSSLYISQFIIMYSLDGKKWQTYRGNSTGTLMVFFGNVDSSGIKHNIFNPPIIARYIRLHPTHYSIRSTLRMELMGCDLNSCSMPLGMESKAISDAQITASSYFTNMFATWSPSKARLHLQGRSNAWRPQVNNPKEWLQVDFQKTMKVTGVTTQGVKSLLTSMYVKEFLISSSQDGHQWTLFFQNGKVKVFQGNQDSFTPVVNSLDPPLLTRYLRIHPQSWVHQIALRMEVLGCEAQDLY

SEQ ID NO: 2635 - DNA, 4371 bp, synthetic construct
  misc_feature 1..4371: note = Variant of human B-domain deleted Factor VIII
  source 1..4371: mol_type = other DNA
atgcagattgaactgtctacctgcttcttcctctgtttgctgaggttctgctttagcgccactagacggtactaccttggcgctgtggagctgtcctgggactatatgcagagtgatttgggagagcttcccgtcgacgcacgatttcctcctcgcgttccaaagtcatttcccttcaacacaagcgtggtgtacaagaagacgctcttcgtcgaattcaccgatcacctgttcaatatcgccaaacccagaccaccatggatgggtcttttggggcctaccatacaagcggaggtgtatgacacagttgttatcactctcaagaacatggcttctcatccggtaagtcttcacgcagtgggcgtgtcctactggaaagcttcagaaggagccgagtatgatgatcagacatcccagagggagaaagaagacgacaaggtatttccaggtgggtctcatacctatgtgtggcaagtgctcaaagagaatggccctatggcaagcgatccgctctgtttgacttacagctacctttcacacgttgacctcgtcaaggacctcaactccgggttgattggagccttgttggtatgcagggaaggatctcttgccaaagagaagacacagaccctccacaagtttatccttctctttgctgtgttcgatgagggcaaaagttggcatagcgaaacgaagaattccctcatgcaggatcgcgacgcagccagcgccagagcttggcccaagatgcacactgtgaacggatatgtcaataggtcacttcctggcttgattgggtgtcatcggaaaagtgtctactggcacgtgatcggaatggggacaacaccagaggtccactccatatttctcgaaggccataccttccttgttcgaaaccacagacaggcatccttggctatctctcccattacctttctcactgcccaaacgctccttatggacttgggtcagttccttctcttctgccatatcagctcacaccagcatgatggtatggaagcttatgtgaaagtcgacagttgtcctgaggagccacagttgcgcatgaagaataatgaagaagccgaggattacgacgacgatctcaccgattctgagatggacgtggtgaggtttgatgacgacaactctccctccttcattcaaatccggagcgtggcgaagaaacaccccaagacttgggtccactatatagcggcggaagaggaggattgggattacgctcctcttgtattggcaccagatgaccgctcatacaaaagccagtacctcaacaacggaccgcagagaattggccggaagtataagaaagtgcgatttatggcctatacagacgaaacctttaagacaagggaggccatccagcatgagagtgggattttgggacctcttctttacggcgaagttggtgataccctcctcatcatcttcaagaatcaagcttctcgcccctataacatttacccacacgggatcactgacgttaggcctttgtatagcagaagacttcccaaaggcgtgaagcatctcaaagacttccccattttgccaggcgagatctttaagtacaaatggaccgtcacagtggaagatggaccgactaaatcagaccctcgatgccttacgcggtactattcctccttcgtgaatatggagagagatttggcaagcggactcataggaccactcctcatctgttacaaggaatctgtagaccagaggggtaaccagattatgagtgataaacgcaatgtgatcctttttagcgtcttcgacgagaaccggtcctggtacttgaccgagaatatacaaaggttccttcccaaccccgcaggcgttcagttggaagaccctgagtttcaggccagcaatattatgcactcaatcaacggctatgtgtttgatagtctccagctttctgtttgcctccatgaagtagcctattggtacatcttgtcaattggtgctcaaacagacttcctctccgtcttcttctccggctacacctttaagcacaagatggtgtatgaggacactctcacactctttccattttctggagaaaccgtgttcatgagcatggagaatccaggcctttggatcttgggttgccacaacagtgattttcgcaatcggggaatgactgctctcctcaaagtcagcagctgtgataagaacacaggcgactattacgaagattcttacgaggacataagtgcctacttgttgtccaagaataacgccattgagcccagatcattctcccagaatcctcccgtgcttaaaaggcatcagcgcgaaatcaccagaactactcttcagtctgatcaagaggagattgactatgacgacaccataagcgtggaaatgaagaaggaggatttcgatatctatgacgaagatgagaaccagtctccgcggagctttcagaagaagacgcgacactacttcattgcagcagtcgaaaggctttgggactacggtatgtcatcatcccctcatgtgttgcgcaatagagctcagagtggaagtgttccacagttcaagaaagtcgtctttcaagagtttacagatggcagcttcacacagcctctctatcggggcgagcttaacgaacatttgggactccttggtccctatatccgagccgaagtggaggacaacattatggttacctttaggaatcaagcctctcgcccctacagcttctactcctccctcatcagttatgaggaggatcagagacaaggcgctgaaccacggaagaactttgtgaaaccgaatgagacgaagacctacttctggaaagtacagcaccacatggcccccacaaaagacgaattcgattgcaaagcatgggcgtatttttcagacgttgacttggagaaagatgtacattcaggacttattggtcctttgttggtgtgtcacactaacactctcaatccagcccatggcaggcaggtgacagtccaggaattcgctcttttctttaccatctttgatgagaccaagtcctggtacttcacggaaaacatggagcgcaattgcagagccccctgtaacatacagatggaggaccctacctttaaggaaaattatcggttccacgcaatcaacggatacattatggatacactccctggccttgtgatggctcaggaccaacgaatcaggtggtacctcctcagcatgggttctaatgagaacatacactccattcacttttcaggacatgtgttcactgtccggaagaaagaagagtataagatggccctctacaatttgtatccaggcgtgtttgagaccgttgaaatgcttccctctaaagctggcatctggagagtagagtgcttgatcggagaacatcttcacgcaggtatgagcaccttgttcctcgtgtacagcaacaaatgtcagaccccacttggcatggccagtggacacattcgcgactttcagatcacagcatctggccagtatggacaatgggccccaaagttggctcgcctccattactccggtagcataaatgcgtggtccactaaagaacctttcagctggattaaggtcgatcttcttgcccccatgatcatccacggcattaagacacagggagcgaggcagaaattctcctccctctacatctcacagttcattattatgtatagtttggacggcaagaagtggcaaacttatagaggtaacagtactggaacactcatggtgttcttcggcaacgttgatagctctggcatcaaacacaacatctttaatcctcccataatagctcggtacatcagattgcatccgacccactacagcattaggagtacactccgaatggagcttatgggttgcgacttgaattcctgttcaatgccactcggaatggagtctaaagccatctctgatgcacagataaccgccagtagctactttacgaacatgtttgctacgtggtcaccctctaaggcaaggcttcatttgcaaggccggtctaatgcctggagacctcaggtgaacaacccgaaagaatggctccaggtggactttcagaagaccatgaaagtaacaggtgtcactactcagggagttaagtccttgctcaccagcatgtatgtgaaggagttccttatttcctcatcacaagatggccaccagtggaccctcttctttcagaatggtaaggtcaaagtgtttcagggcaatcaagacagcttcacacccgtggtgaacagtcttgatcctccactcttgacacgataccttcgaatccatccacagtcttgggttcaccagattgcattgcgcatggaagtacttggatgcgaggctcaggacctctac

SEQ ID NO: 2636 - protein, 1457 aa, synthetic construct
  REGION 1..1457: note = Variant of human B-domain deleted Factor VIII
MQIELSTCFFLCLLRFCFSATRRYYLGAVELSWDYMQSDLGELPVDARFPPRVPKSFPFNTSVVYKKTLFVEFTDHLFNIAKPRPPWMGLLGPTIQAEVYDTVVITLKNMASHPVSLHAVGVSYWKASEGAEYDDQTSQREKEDDKVFPGGSHTYVWQVLKENGPMASDPLCLTYSYLSHVDLVKDLNSGLIGALLVCREGSLAKEKTQTLHKFILLFAVFDEGKSWHSETKNSLMQDRDAASARAWPKMHTVNGYVNRSLPGLIGCHRKSVYWHVIGMGTTPEVHSIFLEGHTFLVRNHRQASLAISPITFLTAQTLLMDLGQFLLFCHISSHQHDGMEAYVKVDSCPEEPQLRMKNNEEAEDYDDDLTDSEMDVVRFDDDNSPSFIQIRSVAKKHPKTWVHYIAAEEEDWDYAPLVLAPDDRSYKSQYLNNGPQRIGRKYKKVRFMAYTDETFKTREAIQHESGILGPLLYGEVGDTLLIIFKNQASRPYNIYPHGITDVRPLYSRRLPKGVKHLKDFPILPGEIFKYKWTVTVEDGPTKSDPRCLTRYYSSFVNMERDLASGLIGPLLICYKESVDQRGNQIMSDKRNVILFSVFDENRSWYLTENIQRFLPNPAGVQLEDPEFQASNIMHSINGYVFDSLQLSVCLHEVAYWYILSIGAQTDFLSVFFSGYTFKHKMVYEDTLTLFPFSGETVFMSMENPGLWILGCHNSDFRNRGMTALLKVSSCDKNTGDYYEDSYEDISAYLLSKNNAIEPRSFSQNPPVLKRHQREITRTTLQSDQEEIDYDDTISVEMKKEDFDIYDEDENQSPRSFQKKTRHYFIAAVERLWDYGMSSSPHVLRNRAQSGSVPQFKKVVFQEFTDGSFTQPLYRGELNEHLGLLGPYIRAEVEDNIMVTFRNQASRPYSFYSSLISYEEDQRQGAEPRKNFVKPNETKTYFWKVQHHMAPTKDEFDCKAWAYFSDVDLEKDVHSGLIGPLLVCHTNTLNPAHGRQVTVQEFALFFTIFDETKSWYFTENMERNCRAPCNIQMEDPTFKENYRFHAINGYIMDTLPGLVMAQDQRIRWYLLSMGSNENIHSIHFSGHVFTVRKKEEYKMALYNLYPGVFETVEMLPSKAGIWRVECLIGEHLHAGMSTLFLVYSNKCQTPLGMASGHIRDFQITASGQYGQWAPKLARLHYSGSINAWSTKEPFSWIKVDLLAPMIIHGIKTQGARQKFSSLYISQFIIMYSLDGKKWQTYRGNSTGTLMVFFGNVDSSGIKHNIFNPPIIARYIRLHPTHYSIRSTLRMELMGCDLNSCSMPLGMESKAISDAQITASSYFTNMFATWSPSKARLHLQGRSNAWRPQVNNPKEWLQVDFQKTMKVTGVTTQGVKSLLTSMYVKEFLISSSQDGHQWTLFFQNGKVKVFQGNQDSFTPVVNSLDPPLLTRYLRIHPQSWVHQIALRMEVLGCEAQDLY

SEQ ID NO: 2637 - DNA, 4371 bp, synthetic construct
  misc_feature 1..4371: note = Variant of human B-domain deleted Factor VIII
  source 1..4371: mol_type = other DNA
atgcagattgaactgtctacctgcttcttcctctgtttgctgaggttctgctttagcgccactagacggtactaccttggcgctgtggagctgtcctgggactatatgcagagtgatttgggagagcttcccgtcgacgcacgatttcctcctcgcgttccaaagtcatttcccttcaacacaagcgtggtgtacaagaagacgctcttcgtcgaattcaccgatcacctgttcaatatcgccaaacccagaccaccatggatgggtcttttggggcctaccatacaagcggaggtgtatgacacagttgttatcactctcaagaacatggcttctcatccggtaagtcttcacgcagtgggcgtgtcctactggaaagcttcagaaggagccgagtatgatgatcagacatcccagagggagaaagaagacgacaaggtatttccaggtgggtctcatacctatgtgtggcaagtgctcaaagagaatggccctatggcaagcgatccgctctgtttgacttacagctacctttcacacgttgacctcgtcaaggacctcaactccgggttgattggagccttgttggtatgcagggaaggatctcttgccaaagagaagacacagaccctccacaagtttatccttctctttgctgtgttcgatgagggcaaaagttggcatagcgaaacgaagaattccctcatgcaggatcgcgacgcagccagcgccagagcttggcccaagatgcacactgtgaacggatatgtcaataggtcacttcctggcttgattgggtgtcatcggaaaagtgtctactggcacgtgatcggaatggggacaacaccagaggtccactccatatttctcgaaggccataccttccttgttcgaaaccacagacaggcatccttggagatctctcccattacctttctcactgcccaaacgctccttatggacttgggtcagttccttctcttctgccatatcagctcacaccagcatgatggtatggaagcttatgtgaaagtcgacagttgtcctgaggagccacagttgcgcatgaagaataatgaagaagccgaggattacgacgacgatctcaccgattctgagatggacgtggtgaggtttgatgacgacaactctccctccttcattcaaatccggagcgtggcgaagaaacaccccaagacttgggtccactatatagcggcggaagaggaggattgggattacgctcctcttgtattggcaccagatgaccgctcatacaaaagccagtacctcaacaacggaccgcagagaattggccggaagtataagaaagtgcgatttatggcctatacagacgaaacctttaagacaagggaggccatccagcatgagagtgggattttgggacctcttctttacggcgaagttggtgataccctcctcatcatcttcaagaatcaagcttctcgcccctataacatttacccacacgggatcactgacgttaggcctttgtatagcagaagacttcccaaaggcgtgaagcatctcaaagacttccccattttgccaggcgagatctttaagtacaaatggaccgtcacagtggaagatggaccgactaaatcagaccctcgatgccttacgcggtactattcctccttcgtgaatatggagagagatttggcaagcggactcataggaccactcctcatctgttacaaggaatctgtagaccagaggggtaaccagattatgagtgataaacgcaatgtgatcctttttagcgtcttcgacgagaaccggtcctggtacttgaccgagaatatacaaaggttccttcccaaccccgcaggcgttcagttggaagaccctgagtttcaggccagcaatattatgcactcaatcaacggctatgtgtttgatagtctccagctttctgtttgcctccatgaagtagcctattggtacatcttgtcaattggtgctcaaacagacttcctctccgtcttcttctccggctacacctttaagcacaagatggtgtatgaggacactctcacactctttccattttctggagaaaccgtgttcatgagcatggagaatccaggcctttggatcttgggttgccacaacagtgattttcgcaatcggggaatgactgctctcctcaaagtcagcagctgtgataagaacacaggcgactattacgaagattcttacgaggacataagtgcctacttgttgtccaagaataacgccattgagcccagatcattctcccagaatcctcccgtgcttaaaaggcatcagcgcgaaatcaccagaactactcttcagtctgatcaagaggagattgactatgacgacaccataagcgtggaaatgaagaaggaggatttcgatatctatgacgaagatgagaaccagtctccgcggagctttcagaagaagacgcgacactacttcattgcagcagtcgaaaggctttgggactacggtatgtcatcatcccctcatgtgttgcgcaatagagctcagagtggaagtgttccacagttcaagaaagtcgtctttcaagagtttacagatggcagcttcacacagcctctctatcggggcgagcttaacgaacatttgggactccttggtccctatatccgagccgaagtggaggacaacattatggttacctttaggaatcaagcctctcgcccctacagcttctactcctccctcatcagttatgaggaggatcagagacaaggcgctgaaccacggaagaactttgtgaaaccgaatgagacgaagacctacttctggaaagtacagcaccacatggcccccacaaaagacgaattcgattgcaaagcatgggcgtatttttcagacgttgacttggagaaagatgtacattcaggacttattggtcctttgttggtgtgtcacactaacactctcaatccagcccatggcaggcaggtgacagtccaggaattcgctcttttctttaccatctttgatgagaccaagtcctggtacttcacggaaaacatggagcgcaattgcagagccccctgtaacatacagatggaggaccctacctttaaggaaaattatcggttccacgcaatcaacggatacattatggatacactccctggccttgtgatggctcaggaccaacgaatcaggtggtacctcctcagcatgggttctaatgagaacatacactccattcacttttcaggacatgtgttcactgtccggaagaaagaagagtataagatggccctctacaatttgtatccaggcgtgtttgagaccgttgaaatgcttccctctaaagctggcatctggagagtagagtgcttgatcggagaacatcttcacgcaggtatgagcaccttgttcctcgtgtacagcaacaaatgtcagaccccacttggcatggccagtggacacattcgcgactttcagatcacagcatctggccagtatggacaatgggccccaaagttggctcgcctccattactccggtagcataaatgcgtggtccactaaagaacctttcagctggattaaggtcgatcttcttgcccccatgatcatccacggcattaagacacagggagcgaggcagaaattctcctccctctacatctcacagttcattattatgtatagtttggacggcaagaagtggcaaacttatagaggtaacagtactggaacactcatggtgttcttcggcaacgttgatagctctggcatcaaacacaacatctttaatcctcccataatagctcggtacatcagattgcatccgacccactacagcattaggagtacactccgaatggagcttatgggttgcgacttgaattcctgttcaatgccactcggaatggagtctaaagccatctctgatgcacagataaccgccagtagctactttacgaacatgtttgctacgtggtcaccctctaaggcaaggcttcatttgcaaggccggtctaatgcctggagacctcaggtgaacaacccgaaagaatggctccaggtggactttcagaagaccatgaaagtaacaggtgtcactactcagggagttaagtccttgctcaccagcatgtatgtgaaggagttccttatttcctcatcacaagatggccaccagtggaccctcttctttcagaatggtaaggtcaaagtgtttcagggcaatcaagactgtttcacacccgtggtgaacagtcttgatcctccactcttgacacgataccttcgaatccatccacagtcttgggttcaccagattgcattgcgcatggaagtacttggatgcgaggctcaggacctctac

SEQ ID NO: 2638 - protein, 1457 aa, synthetic construct
  REGION 1..1457: note = Variant of human B-domain deleted Factor VIII
MQIELSTCFFLCLLRFCFSATRRYYLGAVELSWDYMQSDLGELPVDARFPPRVPKSFPFNTSVVYKKTLFVEFTDHLFNIAKPRPPWMGLLGPTIQAEVYDTVVITLKNMASHPVSLHAVGVSYWKASEGAEYDDQTSQREKEDDKVFPGGSHTYVWQVLKENGPMASDPLCLTYSYLSHVDLVKDLNSGLIGALLVCREGSLAKEKTQTLHKFILLFAVFDEGKSWHSETKNSLMQDRDAASARAWPKMHTVNGYVNRSLPGLIGCHRKSVYWHVIGMGTTPEVHSIFLEGHTFLVRNHRQASLEISPITFLTAQTLLMDLGQFLLFCHISSHQHDGMEAYVKVDSCPEEPQLRMKNNEEAEDYDDDLTDSEMDVVRFDDDNSPSFIQIRSVAKKHPKTWVHYIAAEEEDWDYAPLVLAPDDRSYKSQYLNNGPQRIGRKYKKVRFMAYTDETFKTREAIQHESGILGPLLYGEVGDTLLIIFKNQASRPYNIYPHGITDVRPLYSRRLPKGVKHLKDFPILPGEIFKYKWTVTVEDGPTKSDPRCLTRYYSSFVNMERDLASGLIGPLLICYKESVDQRGNQIMSDKRNVILFSVFDENRSWYLTENIQRFLPNPAGVQLEDPEFQASNIMHSINGYVFDSLQLSVCLHEVAYWYILSIGAQTDFLSVFFSGYTFKHKMVYEDTLTLFPFSGETVFMSMENPGLWILGCHNSDFRNRGMTALLKVSSCDKNTGDYYEDSYEDISAYLLSKNNAIEPRSFSQNPPVLKRHQREITRTTLQSDQEEIDYDDTISVEMKKEDFDIYDEDENQSPRSFQKKTRHYFIAAVERLWDYGMSSSPHVLRNRAQSGSVPQFKKVVFQEFTDGSFTQPLYRGELNEHLGLLGPYIRAEVEDNIMVTFRNQASRPYSFYSSLISYEEDQRQGAEPRKNFVKPNETKTYFWKVQHHMAPTKDEFDCKAWAYFSDVDLEKDVHSGLIGPLLVCHTNTLNPAHGRQVTVQEFALFFTIFDETKSWYFTENMERNCRAPCNIQMEDPTFKENYRFHAINGYIMDTLPGLVMAQDQRIRWYLLSMGSNENIHSIHFSGHVFTVRKKEEYKMALYNLYPGVFETVEMLPSKAGIWRVECLIGEHLHAGMSTLFLVYSNKCQTPLGMASGHIRDFQITASGQYGQWAPKLARLHYSGSINAWSTKEPFSWIKVDLLAPMIIHGIKTQGARQKFSSLYISQFIIMYSLDGKKWQTYRGNSTGTLMVFFGNVDSSGIKHNIFNPPIIARYIRLHPTHYSIRSTLRMELMGCDLNSCSMPLGMESKAISDAQITASSYFTNMFATWSPSKARLHLQGRSNAWRPQVNNPKEWLQVDFQKTMKVTGVTTQGVKSLLTSMYVKEFLISSSQDGHQWTLFFQNGKVKVFQGNQDCFTPVVNSLDPPLLTRYLRIHPQSWVHQIALRMEVLGCEAQDLY

SEQ ID NO: 2639 - DNA, 4371 bp, synthetic construct
  misc_feature 1..4371: note = Variant of human B-domain deleted Factor VIII
  source 1..4371: mol_type = other DNA
atgcagattgaactgtctacctgcttcttcctctgtttgctgaggttctgctttagcgccactagacggtactaccttggcgctgtggagctgtcctgggactatatgcagagtgatttgggagagcttcccgtcgacgcacgatttcctcctcgcgttccaaagtcatttcccttcaacacaagcgtggtgtacaagaagacgctcttcgtcgaattcaccgatcacctgttcaatatcgccaaacccagaccaccatggatgggtcttttggggcctaccatacaagcggaggtgtatgacacagttgttatcactctcaagaacatggcttctcatccggtaagtcttcacgcagtgggcgtgtcctactggaaagcttcagaaggagccgagtatgatgatcagacatcccagagggagaaagaagacgacaaggtatttccaggtgggtctcatacctatgtgtggcaagtgctcaaagagaatggccctatggcaagcgatccgctctgtttgacttacagctacctttcacacgttgacctcgtcaaggacctcaactccgggttgattggagccttgttggtatgcagggaaggatctcttgccaaagagaagacacagaccctccacaagtttatccttctctttgctgtgttcgatgagggcaaaagttggcatagcgaaacgaagaattccctcatgcaggatcgcgacgcagccagcgccagagcttggcccaagatgcacactgtgaacggatatgtcaataggtcacttcctggcttgattgggtgtcatcggaaaagtgtctactggcacgtgatcggaatggggacaacaccagaggtccactccatatttctcgaaggccataccttccttgttcgaaaccacagacaggcatccttggagatctctcccattacctttctcactgcccaaacgctccttatggacttgggtcagttccttctcttctgccatatcagctcacaccagcatgatggtatggaagcttatgtgaaagtcgacagttgtcctgaggagccacagttgcgcatgaagaataatgaagaagccgaggattacgacgacgatctcaccgattctgagatggacgtggtgaggtttgatgacgacaactctccctccttcattcaaatccggagcgtggcgaagaaacaccccaagacttgggtccactatatagcggcggaagaggaggattgggattacgctcctcttgtattggcaccagatgaccgctcatacaaaagccagtacctcaacaacggaccgcagagaattggccggaagtataagaaagtgcgatttatggcctatacagacgaaacctttaagacaagggaggccatccagcatgagagtgggattttgggacctcttctttacggcgaagttggtgataccctcctcatcatcttcaagaatcaagcttctcgcccctataacatttacccacacgggatcactgacgttaggcctttgtatagcagaagacttcccaaaggcgtgaagcatctcaaagacttccccattttgccaggcgagatctttaagtacaaatggaccgtcacagtggaagatggaccgactaaatcagaccctcgatgccttacgcggtactattcctccttcgtgaatatggagagagatttggcaagcggactcataggaccactcctcatctgttacaaggaatctgtagaccagaggggtaaccagattatgagtgataaacgcaatgtgatcctttttagcgtcttcgacgagaaccggtcctggtacttgaccgagaatatacaaaggttccttcccaaccccgcaggcgttcagttggaagaccctgagtttcaggccagcaatattatgcactcaatcaacggctatgtgtttgatagtctccagctttctgtttgcctccatgaagtagcctattggtacatcttgtcaattggtgctcaaacagacttcctctccgtcttcttctccggctacacctttaagcacaagatggtgtatgaggacactctcacactctttccattttctggagaaaccgtgttcatgagcatggagaatccaggcctttggatcttgggttgccacaacagtgattttcgcaatcggggaatgactgctctcctcaaagtcagcagctgtgataagaacacaggcgactattacgaagattcttacgaggacataagtgcctacttgttgtccaagaataacgccattgagcccagatcattctcccagaatcctcccgtgcttaaaaggcatcagcgcgaaatcaccagaactactcttcagtctgatcaagaggagattgactatgacgacaccataagcgtggaaatgaagaaggaggatttcgatatccctgacgaagatgagaaccagtctccgcggagctttcagaagaagacgcgacactacttcattgcagcagtcgaaaggctttgggactacggtatgtcatcatcccctcatgtgttgcgcaatagagctcagagtggaagtgttccacagttcaagaaagtcgtctttcaagagtttacagatggcagcttcacacagcctctctatcggggcgagcttaacgaacatttgggactccttggtccctatatccgagccgaagtggaggacaacattatggttacctttaggaatcaagcctctcgcccctacagcttctactcctccctcatcagttatgaggaggatcagagacaaggcgctgaaccacggaagaactttgtgaaaccgaatgagacgaagacctacttctggaaagtacagcaccacatggcccccacaaaagacgaattcgattgcaaagcatgggcgtatttttcagacgttgacttggagaaagatgtacattcaggacttattggtcctttgttggtgtgtcacactaacactctcaatccagcccatggcaggcaggtgacagtccaggaattcgctcttttctttaccatctttgatgagaccaagtcctggtacttcacggaaaacatggagcgcaattgcagagccccctgtaacatacagatggaggaccctacctttaaggaaaattatcggttccacgcaatcaacggatacattatggatacactccctggccttgtgatggctcaggaccaacgaatcaggtggtacctcctcagcatgggttctaatgagaacatacactccattcacttttcaggacatgtgttcactgtccggaagaaagaagagtataagatggccctctacaatttgtatccaggcgtgtttgagaccgttgaaatgcttccctctaaagctggcatctggagagtagagtgcttgatcggagaacatcttcacgcaggtatgagcaccttgttcctcgtgtacagcaacaaatgtcagaccccacttggcatggccagtggacacattcgcgactttcagatcacagcatctggccagtatggacaatgggccccaaagttggctcgcctccattactccggtagcataaatgcgtggtccactaaagaacctttcagctggattaaggtcgatcttcttgcccccatgatcatccacggcattaagacacagggagcgaggcagaaattctcctccctctacatctcacagttcattattatgtatagtttggacggcaagaagtggcaaacttatagaggtaacagtactggaacactcatggtgttcttcggcaacgttgatagctctggcatcaaacacaacatctttaatcctcccataatagctcggtacatcagattgcatccgacccactacagcattaggagtacactccgaatggagcttatgggttgcgacttgaattcctgttcaatgccactcggaatggagtctaaagccatctctgatgcacagataaccgccagtagctactttacgaacatgtttgctacgtggtcaccctctaaggcaaggcttcatttgcaaggccggtctaatgcctggagacctcaggtgaacaacccgaaagaatggctccaggtggactttcagaagaccatgaaagtaacaggtgtcactactcagggagttaagtccttgctcaccagcatgtatgtgaaggagttccttatttcctcatcacaagatggccaccagtggaccctcttctttcagaatggtaaggtcaaagtgtttcagggcaatcaagacagcttcacacccgtggtgaacagtcttgatcctccactcttgacacgataccttcgaatccatccacagtcttgggttcaccagattgcattgcgcatggaagtacttggatgcgaggctcaggacctctac

SEQ ID NO: 2640 - protein, 1457 aa, synthetic construct
  REGION 1..1457: note = Variant of human B-domain deleted Factor VIII
MQIELSTCFFLCLLRFCFSATRRYYLGAVELSWDYMQSDLGELPVDARFPPRVPKSFPFNTSVVYKKTLFVEFTDHLFNIAKPRPPWMGLLGPTIQAEVYDTVVITLKNMASHPVSLHAVGVSYWKASEGAEYDDQTSQREKEDDKVFPGGSHTYVWQVLKENGPMASDPLCLTYSYLSHVDLVKDLNSGLIGALLVCREGSLAKEKTQTLHKFILLFAVFDEGKSWHSETKNSLMQDRDAASARAWPKMHTVNGYVNRSLPGLIGCHRKSVYWHVIGMGTTPEVHSIFLEGHTFLVRNHRQASLEISPITFLTAQTLLMDLGQFLLFCHISSHQHDGMEAYVKVDSCPEEPQLRMKNNEEAEDYDDDLTDSEMDVVRFDDDNSPSFIQIRSVAKKHPKTWVHYIAAEEEDWDYAPLVLAPDDRSYKSQYLNNGPQRIGRKYKKVRFMAYTDETFKTREAIQHESGILGPLLYGEVGDTLLIIFKNQASRPYNIYPHGITDVRPLYSRRLPKGVKHLKDFPILPGEIFKYKWTVTVEDGPTKSDPRCLTRYYSSFVNMERDLASGLIGPLLICYKESVDQRGNQIMSDKRNVILFSVFDENRSWYLTENIQRFLPNPAGVQLEDPEFQASNIMHSINGYVFDSLQLSVCLHEVAYWYILSIGAQTDFLSVFFSGYTFKHKMVYEDTLTLFPFSGETVFMSMENPGLWILGCHNSDFRNRGMTALLKVSSCDKNTGDYYEDSYEDISAYLLSKNNAIEPRSFSQNPPVLKRHQREITRTTLQSDQEEIDYDDTISVEMKKEDFDIPDEDENQSPRSFQKKTRHYFIAAVERLWDYGMSSSPHVLRNRAQSGSVPQFKKVVFQEFTDGSFTQPLYRGELNEHLGLLGPYIRAEVEDNIMVTFRNQASRPYSFYSSLISYEEDQRQGAEPRKNFVKPNETKTYFWKVQHHMAPTKDEFDCKAWAYFSDVDLEKDVHSGLIGPLLVCHTNTLNPAHGRQVTVQEFALFFTIFDETKSWYFTENMERNCRAPCNIQMEDPTFKENYRFHAINGYIMDTLPGLVMAQDQRIRWYLLSMGSNENIHSIHFSGHVFTVRKKEEYKMALYNLYPGVFETVEMLPSKAGIWRVECLIGEHLHAGMSTLFLVYSNKCQTPLGMASGHIRDFQITASGQYGQWAPKLARLHYSGSINAWSTKEPFSWIKVDLLAPMIIHGIKTQGARQKFSSLYISQFIIMYSLDGKKWQTYRGNSTGTLMVFFGNVDSSGIKHNIFNPPIIARYIRLHPTHYSIRSTLRMELMGCDLNSCSMPLGMESKAISDAQITASSYFTNMFATWSPSKARLHLQGRSNAWRPQVNNPKEWLQVDFQKTMKVTGVTTQGVKSLLTSMYVKEFLISSSQDGHQWTLFFQNGKVKVFQGNQDSFTPVVNSLDPPLLTRYLRIHPQSWVHQIALRMEVLGCEAQDLY

SEQ ID NO: 2641 - DNA, 4371 bp, synthetic construct
  misc_feature 1..4371: note = Variant of human B-domain deleted Factor VIII
  source 1..4371: mol_type = other DNA
atgcagattgaactgtctacctgcttcttcctctgtttgctgaggttctgctttagcgccactagacggtactaccttggcgctgtggagctgtcctgggactatatgcagagtgatttgggagagcttcccgtcgacgcacgatttcctcctcgcgttccaaagtcatttcccttcaacacaagcgtggtgtacaagaagacgctcttcgtcgaattcaccgatcacctgttcaatatcgccaaacccagaccaccatggatgggtcttttggggcctaccatacaagcggaggtgtatgacacagttgttatcactctcaagaacatggcttctcatccggtaagtcttcacgcagtgggcgtgtcctactggaaagcttcagaaggagccgagtatgatgatcagacatcccagagggagaaagaagacgacaaggtatttccaggtgggtctcatacctatgtgtggcaagtgctcaaagagaatggccctatggcaagcgatccgctctgtttgacttacagctacctttcacacgttgacctcgtcaaggacctcaactccgggttgattggagccttgttggtatgcagggaaggatctcttgccaaagagaagacacagaccctcttgaagtttatccttctctttgctgtgttcgatgagggcaaaagttggcatagcgaaacgaagaattccctcatgcaggatcgcgacgcagccagcgccagagcttggcccaagatgcacactgtgaacggatatgtcaataggtcacttcctggcttgattgggtgtcatcggaaaagtgtctactggcacgtgatcggaatggggacaacaccagaggtccactccatatttctcgaaggccataccttccttgttcgaaaccacagacaggcatccttggagatctctcccattacctttctcactgcccaaacgctccttatggacttgggtcagttccttctcttctgccatatcagctcacaccagcatgatggtatggaagcttatgtgaaagtcgacagttgtcctgaggagccacagttgcgcatgaagaataatgaagaagccgaggattacgacgacgatctcaccgattctgagatggacgtggtgaggtttgatgacgacaactctccctccttcattcaaatccggagcgtggcgaagaaacaccccaagacttgggtccactatatagcggcggaagaggaggattgggattacgctcctcttgtattggcaccagatgaccgctcatacaaaagccagtacctcaacaacggaccgcagagaattggccggaagtataagaaagtgcgatttatggcctatacagacgaaacctttaagacaagggaggccatccagcatgagagtgggattttgggacctcttctttacggcgaagttggtgataccctcctcatcatcttcaagaatcaagcttctcgcccctataacatttacccacacgggatcactgacgttaggcctttgtatagcagaagacttcccaaaggcgtgaagcatctcaaagacttccccattttgccaggcgagatctttaagtacaaatggaccgtcacagtggaagatggaccgactaaatcagaccctcgatgccttacgcggtactattcctccttcgtgaatatggagagagatttggcaagcggactcataggaccactcctcatctgttacaaggaatctgtagaccagaggggtaaccagattatgagtgataaacgcaatgtgatcctttttagcgtcttcgacgagaaccggtcctggtacttgaccgagaatatacaaaggttccttcccaaccccgcaggcgttcagttggaagaccctgagtttcaggccagcaatattatgcactcaatcaacggctatgtgtttgatagtctccagctttctgtttgcctccatgaagtagcctattggtacatcttgtcaattggtgctcaaacagacttcctctccgtcttcttctccggctacacctttaagcacaagatggtgtatgaggacactctcacactctttccattttctggagaaaccgtgttcatgagcatggagaatccaggcctttggatcttgggttgccacaacagtgattttcgcaatcggggaatgactgctctcctcaaagtcagcagctgtgataagaacacaggcgactattacgaagattcttacgaggacataagtgcctacttgttgtccaagaataacgccattgagcccagatcattctcccagaatcctcccgtgcttaaaaggcatcagcgcgaaatcaccagaactactcttcagtctgatcaagaggagattgactatgacgacaccataagcgtggaaatgaagaaggaggatttcgatatctatgacgaagatgagaaccagtctccgcggagctttcagaagaagacgcgacactacttcattgcagcagtcgaaaggctttgggactacggtatgtcatcatcccctcatgtgttgcgcaatagagctcagagtggaagtgttccacagttcaagaaagtcgtctttcaagagtttacagatggcagcttcacacagcctctctatcggggcgagcttaacgaacatttgggactccttggtccctatatccgagccgaagtggaggacaacattatggttacctttaggaatcaagcctctcgcccctacagcttctactcctccctcatcagttatgaggaggatcagagacaaggcgctgaaccacggaagaactttgtgaaaccgaatgagacgaagacctacttctggaaagtacagcaccacatggcccccacaaaagacgaattcgattgcaaagcatgggcgtatttttcagacgttgacttggagaaagatgtacattcaggacttattggtcctttgttggtgtgtcacactaacactctcaatccagcccatggcaggcaggtgacagtccaggaattcgctcttttctttaccatctttgatgagaccaagtcctggtacttcacggaaaacatggagcgcaattgcagagccccctgtaacatacagatggaggaccctacctttaaggaaaattatcggttccacgcaatcaacggatacattatggatacactccctggccttgtgatggctcaggaccaacgaatcaggtggtacctcctcagcatgggttctaatgagaacatacactccattcacttttcaggacatgtgttcactgtccggaagaaagaagagtataagatggccctctacaatttgtatccaggcgtgtttgagaccgttgaaatgcttccctctaaagctggcatctggagagtagagtgcttgatcggagaacatcttcacgcaggtatgagcaccttgttcctcgtgtacagcaacaaatgtcagaccccacttggcatggccagtggacacattcgcgactttcagatcacagcatctggccagtatggacaatgggccccaaagttggctcgcctccattactccggtagcataaatgcgtggtccactaaagaacctttcagctggattaaggtcgatcttcttgcccccatgatcatccacggcattaagacacagggagcgaggcagaaattctcctccctctacatctcacagttcattattatgtatagtttggacggcaagaagtggcaaacttatagaggtaacagtactggaacactcatggtgttcttcggcaacgttgatagctctggcatcaaacacaacatctttaatcctcccataatagctcggtacatcagattgcatccgacccactacagcattaggagtacactccgaatggagcttatgggttgcgacttgaattcctgttcaatgccactcggaatggagtctaaagccatctctgatgcacagataaccgccagtagctactttacgaacatgtttgctacgtggtcaccctctaaggcaaggcttcatttgcaaggccggtctaatgcctggagacctcaggtgaacaacccgaaagaatggctccaggtggactttcagaagaccatgaaagtaacaggtgtcactactcagggagttaagtccttgctcaccagcatgtatgtgaaggagttccttatttcctcatcacaagatggccaccagtggaccctcttctttcagaatggtaaggtcaaagtgtttcagggcaatcaagacagcttcacacccgtggtgaacagtcttgatcctccactcttgacacgataccttcgaatccatccacagtcttgggttcaccagattgcattgcgcatggaagtacttggatgcgaggctcaggacctctac

SEQ ID NO: 2642 - protein, 1457 aa, synthetic construct
  REGION 1..1457: note = Variant of human B-domain deleted Factor VIII
MQIELSTCFFLCLLRFCFSATRRYYLGAVELSWDYMQSDLGELPVDARFPPRVPKSFPFNTSVVYKKTLFVEFTDHLFNIAKPRPPWMGLLGPTIQAEVYDTVVITLKNMASHPVSLHAVGVSYWKASEGAEYDDQTSQREKEDDKVFPGGSHTYVWQVLKENGPMASDPLCLTYSYLSHVDLVKDLNSGLIGALLVCREGSLAKEKTQTLLKFILLFAVFDEGKSWHSETKNSLMQDRDAASARAWPKMHTVNGYVNRSLPGLIGCHRKSVYWHVIGMGTTPEVHSIFLEGHTFLVRNHRQASLEISPITFLTAQTLLMDLGQFLLFCHISSHQHDGMEAYVKVDSCPEEPQLRMKNNEEAEDYDDDLTDSEMDVVRFDDDNSPSFIQIRSVAKKHPKTWVHYIAAEEEDWDYAPLVLAPDDRSYKSQYLNNGPQRIGRKYKKVRFMAYTDETFKTREAIQHESGILGPLLYGEVGDTLLIIFKNQASRPYNIYPHGITDVRPLYSRRLPKGVKHLKDFPILPGEIFKYKWTVTVEDGPTKSDPRCLTRYYSSFVNMERDLASGLIGPLLICYKESVDQRGNQIMSDKRNVILFSVFDENRSWYLTENIQRFLPNPAGVQLEDPEFQASNIMHSINGYVFDSLQLSVCLHEVAYWYILSIGAQTDFLSVFFSGYTFKHKMVYEDTLTLFPFSGETVFMSMENPGLWILGCHNSDFRNRGMTALLKVSSCDKNTGDYYEDSYEDISAYLLSKNNAIEPRSFSQNPPVLKRHQREITRTTLQSDQEEIDYDDTISVEMKKEDFDIYDEDENQSPRSFQKKTRHYFIAAVERLWDYGMSSSPHVLRNRAQSGSVPQFKKVVFQEFTDGSFTQPLYRGELNEHLGLLGPYIRAEVEDNIMVTFRNQASRPYSFYSSLISYEEDQRQGAEPRKNFVKPNETKTYFWKVQHHMAPTKDEFDCKAWAYFSDVDLEKDVHSGLIGPLLVCHTNTLNPAHGRQVTVQEFALFFTIFDETKSWYFTENMERNCRAPCNIQMEDPTFKENYRFHAINGYIMDTLPGLVMAQDQRIRWYLLSMGSNENIHSIHFSGHVFTVRKKEEYKMALYNLYPGVFETVEMLPSKAGIWRVECLIGEHLHAGMSTLFLVYSNKCQTPLGMASGHIRDFQITASGQYGQWAPKLARLHYSGSINAWSTKEPFSWIKVDLLAPMIIHGIKTQGARQKFSSLYISQFIIMYSLDGKKWQTYRGNSTGTLMVFFGNVDSSGIKHNIFNPPIIARYIRLHPTHYSIRSTLRMELMGCDLNSCSMPLGMESKAISDAQITASSYFTNMFATWSPSKARLHLQGRSNAWRPQVNNPKEWLQVDFQKTMKVTGVTTQGVKSLLTSMYVKEFLISSSQDGHQWTLFFQNGKVKVFQGNQDSFTPVVNSLDPPLLTRYLRIHPQSWVHQIALRMEVLGCEAQDLY

SEQ ID NO: 2643 - DNA, 4371 bp, synthetic construct
  misc_feature 1..4371: note = Variant of human B-domain deleted Factor VIII
  source 1..4371: mol_type = other DNA
atgcagattgaactgtctacctgcttcttcctctgtttgctgaggttctgctttagcgccactagacggtactaccttggcgctgtggagctgtcctgggactatatgcagagtgatttgggagagcttcccgtcgacgcacgatttcctcctcgcgttccaaagtcatttcccttcaacacaagcgtggtgtacaagaagacgctcttcgtcgaattcaccgatcacctgttcaatatcgccaaacccagaccaccatggatgggtcttttggggcctaccatacaagcggaggtgtatgacacagttgttatcactctcaagaacatggcttctcatccggtaagtcttcacgcagtgggcgtgtcctactggaaagcttcagaaggagccgagtatgatgatcagacatcccagagggagaaagaagacgacaaggtatttccaggtgggtctcatacctatgtgtggcaagtgctcaaagagaatggccctatggcaagcgatccgctctgtttgacttacagctacctttcacacgttgacctcgtcaaggacctcaactccgggttgattggagccttgttggtatgcagggaaggatctcttgccaaagagaagacacagaccctccacaagtttatccttctctttgctgtgttcgatgagggcaaaagttggcatagcgaaacgaagaattccctcatgcaggatcgcgacgcagccagcgccagagcttggcccaagatgcacactgtgaacggatatgtcaataggtcacttcctggcttgattgggtgtcatcggaaaagtgtctactggcacgtgatcggaatggggacaacaccagaggtccactccatatttctcgaaggccataccttccttgttcgaaaccacagacaggcatccttggagatctctcccattacctttctcactgcccaaacgctccttatggacttgggtcagttccttctcttctgccatatcagctcacaccagcatgatggtatggaagcttatgtgaaagtcgacagttgtcctgaggagccacagttgcgcatgaagaataatgaagaagccgaggattacgacgacgatctcaccgattctgagatggacgtggtgaggtttgatgacgacaactctccctccttcattcaaatccggagcgtggcgaagaaacaccccaagacttgggtccactatatagcggcggaagaggaggattgggattacgctcctcttgtattggcaccagatgaccgctcatacaaaagccagtacctcaacaacggaccgcagagaattggccggaagtataagaaagtgcgatttatggcctatacagacgaaacctttaagacaagggaggccatccagcatgagagtgggattttgggacctcttctttacggcgaagttggtgataccctcctcatcatcttcaagaatcaagcttctcgcccctataacatttacccacacgggatcactgacgttaggcctttgtatagcagaagacttcccaaaggcgtgaagcatctcaaagacttccccattttgccaggcgagatctttaagtacaaatggaccgtcacagtggaagatggaccgactaaatcagaccctcgatgccttacgcggtactattcctccttcgtgaatatggagagagatttggcaagcggactcataggaccactcctcatctgttacaaggaatctgtagaccagaggggtaaccagattatgagtgataaacgcaatgtgatcctttttagcgtcttcgacgagaaccggtcctggtacttgaccgagaatatacaaaggttccttcccaaccccgcaggcgttcagttggaagaccctgagtttcaggccagcaatattatgcactcaatcaacggctatgtgtttgatagtctccagctttctgtttgcctccatgaagtagcctattggtacatcttgtcaattggtgctcaaacagacttcctctccgtcttcttctccggctacacctttaagcacaagatggtgtatgaggacactctcacactctttccattttctggagaaaccgtgttcatgagcatggagaatccaggcctttggatcttgggttgccacaacagtgattttcgcaatcggggaatgactgctctcctcaaagtcagcagctgtgataagaacacaggcgactattacgaagattcttacgaggacataagtgcctacttgggttccaagaataacgccattgagcccagatcattctcccagaatcctcccgtgcttaaaaggcatcagcgcgaaatcaccagaactactcttcagtctgatcaagaggagattgactatgacgacaccataagcgtggaaatgaagaaggaggatttcgatatctatgacgaagatgagaaccagtctccgcggagctttcagaagaagacgcgacactacttcattgcagcagtcgaaaggctttgggactacggtatgtcatcatcccctcatgtgttgcgcaatagagctcagagtggaagtgttccacagttcaagaaagtcgtctttcaagagtttacagatggcagcttcacacagcctctctatcggggcgagcttaacgaacatttgggactccttggtccctatatccgagccgaagtggaggacaacattatggttacctttaggaatcaagcctctcgcccctacagcttctactcctccctcatcagttatgaggaggatcagagacaaggcgctgaaccacggaagaactttgtgaaaccgaatgagacgaagacctacttctggaaagtacagcaccacatggcccccacaaaagacgaattcgattgcaaagcatgggcgtatttttcagacgttgacttggagaaagatgtacattcaggacttattggtcctttgttggtgtgtcacactaacactctcaatccagcccatggcaggcaggtgacagtccaggaattcgctcttttctttaccatctttgatgagaccaagtcctggtacttcacggaaaacatggagcgcaattgcagagccccctgtaacatacagatggaggaccctacctttaaggaaaattatcggttccacgcaatcaacggatacattatggatacactccctggccttgtgatggctcaggaccaacgaatcaggtggtacctcctcagcatgggttctaatgagaacatacactccattcacttttcaggacatgtgttcactgtccggaagaaagaagagtataagatggccctctacaatttgtatccaggcgtgtttgagaccgttgaaatgcttccctctaaagctggcatctggagagtagagtgcttgatcggagaacatcttcacgcaggtatgagcaccttgttcctcgtgtacagcaacaaatgtcagaccccacttggcatggccagtggacacattcgcgactttcagatcacagcatctggccagtatggacaatgggccccaaagttggctcgcctccattactccggtagcataaatgcgtggtccactaaagaacctttcagctggattaaggtcgatcttcttgcccccatgatcatccacggcattaagacacagggagcgaggcagaaattctcctccctctacatctcacagttcattattatgtatagtttggacggcaagaagtggcaaacttatagaggtaacagtactggaacactcatggtgttcttcggcaacgttgatagctctggcatcaaacacaacatctttaatcctcccataatagctcggtacatcagattgcatccgacccactacagcattaggagtacactccgaatggagcttatgggttgcgacttgaattcctgttcaatgccactcggaatggagtctaaagccatctctgatgcacagataaccgccagtagctactttacgaacatgtttgctacgtggtcaccctctaaggcaaggcttcatttgcaaggccggtctaatgcctggagacctcaggtgaacaacccgaaagaatggctccaggtggactttcagaagaccatgaaagtaacaggtgtcactactcagggagttaagtccttgctcaccagcatgtatgtgaaggagttccttatttcctcatcacaagatggccaccagtggaccctcttctttcagaatggtaaggtcaaagtgtttcagggcaatcaagacagcttcacacccgtggtgaacagtcttgatcctccactcttgacacgataccttcgaatccatccacagtcttgggttcaccagattgcattgcgcatggaagtacttggatgcgaggctcaggacctctac

SEQ ID NO: 2644 - protein, 1457 aa, synthetic construct
  REGION 1..1457: note = Variant of human B-domain deleted Factor VIII
MQIELSTCFFLCLLRFCFSATRRYYLGAVELSWDYMQSDLGELPVDARFPPRVPKSFPFNTSVVYKKTLFVEFTDHLFNIAKPRPPWMGLLGPTIQAEVYDTVVITLKNMASHPVSLHAVGVSYWKASEGAEYDDQTSQREKEDDKVFPGGSHTYVWQVLKENGPMASDPLCLTYSYLSHVDLVKDLNSGLIGALLVCREGSLAKEKTQTLHKFILLFAVFDEGKSWHSETKNSLMQDRDAASARAWPKMHTVNGYVNRSLPGLIGCHRKSVYWHVIGMGTTPEVHSIFLEGHTFLVRNHRQASLEISPITFLTAQTLLMDLGQFLLFCHISSHQHDGMEAYVKVDSCPEEPQLRMKNNEEAEDYDDDLTDSEMDVVRFDDDNSPSFIQIRSVAKKHPKTWVHYIAAEEEDWDYAPLVLAPDDRSYKSQYLNNGPQRIGRKYKKVRFMAYTDETFKTREAIQHESGILGPLLYGEVGDTLLIIFKNQASRPYNIYPHGITDVRPLYSRRLPKGVKHLKDFPILPGEIFKYKWTVTVEDGPTKSDPRCLTRYYSSFVNMERDLASGLIGPLLICYKESVDQRGNQIMSDKRNVILFSVFDENRSWYLTENIQRFLPNPAGVQLEDPEFQASNIMHSINGYVFDSLQLSVCLHEVAYWYILSIGAQTDFLSVFFSGYTFKHKMVYEDTLTLFPFSGETVFMSMENPGLWILGCHNSDFRNRGMTALLKVSSCDKNTGDYYEDSYEDISAYLGSKNNAIEPRSFSQNPPVLKRHQREITRTTLQSDQEEIDYDDTISVEMKKEDFDIYDEDENQSPRSFQKKTRHYFIAAVERLWDYGMSSSPHVLRNRAQSGSVPQFKKVVFQEFTDGSFTQPLYRGELNEHLGLLGPYIRAEVEDNIMVTFRNQASRPYSFYSSLISYEEDQRQGAEPRKNFVKPNETKTYFWKVQHHMAPTKDEFDCKAWAYFSDVDLEKDVHSGLIGPLLVCHTNTLNPAHGRQVTVQEFALFFTIFDETKSWYFTENMERNCRAPCNIQMEDPTFKENYRFHAINGYIMDTLPGLVMAQDQRIRWYLLSMGSNENIHSIHFSGHVFTVRKKEEYKMALYNLYPGVFETVEMLPSKAGIWRVECLIGEHLHAGMSTLFLVYSNKCQTPLGMASGHIRDFQITASGQYGQWAPKLARLHYSGSINAWSTKEPFSWIKVDLLAPMIIHGIKTQGARQKFSSLYISQFIIMYSLDGKKWQTYRGNSTGTLMVFFGNVDSSGIKHNIFNPPIIARYIRLHPTHYSIRSTLRMELMGCDLNSCSMPLGMESKAISDAQITASSYFTNMFATWSPSKARLHLQGRSNAWRPQVNNPKEWLQVDFQKTMKVTGVTTQGVKSLLTSMYVKEFLISSSQDGHQWTLFFQNGKVKVFQGNQDSFTPVVNSLDPPLLTRYLRIHPQSWVHQIALRMEVLGCEAQDLY

SEQ ID NO: 2645 - DNA, 4371 bp, synthetic construct
  misc_feature 1..4371: note = Variant of human B-domain deleted Factor VIII
  source 1..4371: mol_type = other DNA
atgcagattgaactgtctacctgcttcttcctctgtttgctgaggttctgctttagcgccactagacggtactaccttggcgctgtggagctgtcctgggactatatgcagagtgatttgggagagcttcccgtcgacgcacgatttcctcctcgcgttccaaagtcatttcccttcaacacaagcgtggtgtacaagaagacgctcttcgtcgaattcaccgatcacctgttcaatatcgccaaacccagaccaccatggatgggtcttttggggcctaccatacaagcggaggtgtatgacacagttgttatcactctcaagaacatggcttctcatccggtaagtcttcacgcagtgggcgtgtcctactggaaagcttcagaaggagccgagtatgatgatcagacatcccagagggagaaagaagacgacaaggtatttccaggtgggtctcatacctatgtgtggcaagtgctcaaagagaatggccctatggcaagcgatccgctctgtttgacttacagctacctttcacacgttgacctcgtcaaggacctcaactccgggttgattggagccttgttggtatgcagggaaggatctcttgccaaagagaagacacagaccctccacaagtttatccttctctttgctgtgttcgatgagggcaaaagttggcatagcgaaacgaagaattccctcatgcaggatcgcgacgcagccagcgccagagcttggcccaagatgcacactgtgaacggatatgtcaataggtcacttcctggcttgattgggtgtcatcggaaaagtgtctactggcacgtgatcggaatggggacaacaccagaggtccactccatatttctcgaaggccataccttccttgttcgaaaccacagacaggcatccttggagatctctcccattacctttctcactgcccaaacgctccttatggacttgggtcagttccttctcttctgccatatcagctcacaccagcatgatggtatggaagcttatgtgaaagtcgacagttgtcctgaggagccacagttgcgcatgaagaataatgaagaagccgaggattacgacgacgatctcaccgattctgagatggacgtggtgaggtttgatgacgacaactctccctccttcattcaaatccggagcgtggcgaagaaacaccccaagacttgggtccactatatagcggcggaagaggaggattgggattacgctcctcttgtattggcaccagatgaccgctcatacaaaagccagtacctcaacaacggaccgcagagaattggccggaagtataagaaagtgcgatttatggcctatacagacgaaacctttaagacaagggaggccatccagcatgagagtgggattttgggacctcttctttacggcgaagttggtgataccctcctcatcatcttcaagaatcaagcttctcgcccctataacatttacccacacgggatcactgacgttaggcctttgtatagcagaagacttcccaaaggcgtgaagcatctcaaagacttccccattttgccaggcgagatctttaagtacaaatggaccgtcacagtggaagatggaccgactaaatcagaccctcgatgccttacgcggtactattcctccttcgtgaatatggagagagatttggcaagcggactcataggaccactcctcatctgttacaaggaatctgtagaccagaggggtaaccagattatgagtgataaacgcaatgtgatcctttttagcgtcttcgacgagaaccggtcctggtacttgaccgagaatatacaaaggttccttcccaaccccgcaggcgttcagttggaagaccctgagtttcaggccagcaatattatgcactcaatcaacggctatgtgtttgatagtctccagctttctgtttgcctccatgaagtagcctattggtacatcttgtcaattggtgctcaaacagacttcctctccgtcttcttctccggctacacctttaagcacaagatggtgtatgaggacactctcacactctttccattttctggagaaaccgtgttcatgagcatggagaatccaggcctttggatcttgggttgccacaacagtgattttcgcaatcggggaatgactgctctcctcaaagtcagcagctgtgataagaacacaggcgactattacgaagattcttacgaggacataagtgcctacttgttgtccatgaataacgccattgagcccagatcattctcccagaatcctcccgtgcttaaaaggcatcagcgcgaaatcaccagaactactcttcagtctgatcaagaggagattgactatgacgacaccataagcgtggaaatgaagaaggaggatttcgatatctatgacgaagatgagaaccagtctccgcggagctttcagaagaagacgcgacactacttcattgcagcagtcgaaaggctttgggactacggtatgtcatcatcccctcatgtgttgcgcaatagagctcagagtggaagtgttccacagttcaagaaagtcgtctttcaagagtttacagatggcagcttcacacagcctctctatcggggcgagcttaacgaacatttgggactccttggtccctatatccgagccgaagtggaggacaacattatggttacctttaggaatcaagcctctcgcccctacagcttctactcctccctcatcagttatgaggaggatcagagacaaggcgctgaaccacggaagaactttgtgaaaccgaatgagacgaagacctacttctggaaagtacagcaccacatggcccccacaaaagacgaattcgattgcaaagcatgggcgtatttttcagacgttgacttggagaaagatgtacattcaggacttattggtcctttgttggtgtgtcacactaacactctcaatccagcccatggcaggcaggtgacagtccaggaattcgctcttttctttaccatctttgatgagaccaagtcctggtacttcacggaaaacatggagcgcaattgcagagccccctgtaacatacagatggaggaccctacctttaaggaaaattatcggttccacgcaatcaacggatacattatggatacactccctggccttgtgatggctcaggaccaacgaatcaggtggtacctcctcagcatgggttctaatgagaacatacactccattcacttttcaggacatgtgttcactgtccggaagaaagaagagtataagatggccctctacaatttgtatccaggcgtgtttgagaccgttgaaatgcttccctctaaagctggcatctggagagtagagtgcttgatcggagaacatcttcacgcaggtatgagcaccttgttcctcgtgtacagcaacaaatgtcagaccccacttggcatggccagtggacacattcgcgactttcagatcacagcatctggccagtatggacaatgggccccaaagttggctcgcctccattactccggtagcataaatgcgtggtccactaaagaacctttcagctggattaaggtcgatcttcttgcccccatgatcatccacggcattaagacacagggagcgaggcagaaattctcctccctctacatctcacagttcattattatgtatagtttggacggcaagaagtggcaaacttatagaggtaacagtactggaacactcatggtgttcttcggcaacgttgatagctctggcatcaaacacaacatctttaatcctcccataatagctcggtacatcagattgcatccgacccactacagcattaggagtacactccgaatggagcttatgggttgcgacttgaattcctgttcaatgccactcggaatggagtctaaagccatctctgatgcacagataaccgccagtagctactttacgaacatgtttgctacgtggtcaccctctaaggcaaggcttcatttgcaaggccggtctaatgcctggagacctcaggtgaacaacccgaaagaatggctccaggtggactttcagaagaccatgaaagtaacaggtgtcactactcagggagttaagtccttgctcaccagcatgtatgtgaaggagttccttatttcctcatcacaagatggccaccagtggaccctcttctttcagaatggtaaggtcaaagtgtttcagggcaatcaagacagcttcacacccgtggtgaacagtcttgatcctccactcttgacacgataccttcgaatccatccacagtcttgggttcaccagattgcattgcgcatggaagtacttggatgcgaggctcaggacctctac

SEQ ID NO: 2646 - protein, 1457 aa, synthetic construct
  REGION 1..1457: note = Variant of human B-domain deleted Factor VIII
MQIELSTCFFLCLLRFCFSATRRYYLGAVELSWDYMQSDLGELPVDARFPPRVPKSFPFNTSVVYKKTLFVEFTDHLFNIAKPRPPWMGLLGPTIQAEVYDTVVITLKNMASHPVSLHAVGVSYWKASEGAEYDDQTSQREKEDDKVFPGGSHTYVWQVLKENGPMASDPLCLTYSYLSHVDLVKDLNSGLIGALLVCREGSLAKEKTQTLHKFILLFAVFDEGKSWHSETKNSLMQDRDAASARAWPKMHTVNGYVNRSLPGLIGCHRKSVYWHVIGMGTTPEVHSIFLEGHTFLVRNHRQASLEISPITFLTAQTLLMDLGQFLLFCHISSHQHDGMEAYVKVDSCPEEPQLRMKNNEEAEDYDDDLTDSEMDVVRFDDDNSPSFIQIRSVAKKHPKTWVHYIAAEEEDWDYAPLVLAPDDRSYKSQYLNNGPQRIGRKYKKVRFMAYTDETFKTREAIQHESGILGPLLYGEVGDTLLIIFKNQASRPYNIYPHGITDVRPLYSRRLPKGVKHLKDFPILPGEIFKYKWTVTVEDGPTKSDPRCLTRYYSSFVNMERDLASGLIGPLLICYKESVDQRGNQIMSDKRNVILFSVFDENRSWYLTENIQRFLPNPAGVQLEDPEFQASNIMHSINGYVFDSLQLSVCLHEVAYWYILSIGAQTDFLSVFFSGYTFKHKMVYEDTLTLFPFSGETVFMSMENPGLWILGCHNSDFRNRGMTALLKVSSCDKNTGDYYEDSYEDISAYLLSMNNAIEPRSFSQNPPVLKRHQREITRTTLQSDQEEIDYDDTISVEMKKEDFDIYDEDENQSPRSFQKKTRHYFIAAVERLWDYGMSSSPHVLRNRAQSGSVPQFKKVVFQEFTDGSFTQPLYRGELNEHLGLLGPYIRAEVEDNIMVTFRNQASRPYSFYSSLISYEEDQRQGAEPRKNFVKPNETKTYFWKVQHHMAPTKDEFDCKAWAYFSDVDLEKDVHSGLIGPLLVCHTNTLNPAHGRQVTVQEFALFFTIFDETKSWYFTENMERNCRAPCNIQMEDPTFKENYRFHAINGYIMDTLPGLVMAQDQRIRWYLLSMGSNENIHSIHFSGHVFTVRKKEEYKMALYNLYPGVFETVEMLPSKAGIWRVECLIGEHLHAGMSTLFLVYSNKCQTPLGMASGHIRDFQITASGQYGQWAPKLARLHYSGSINAWSTKEPFSWIKVDLLAPMIIHGIKTQGARQKFSSLYISQFIIMYSLDGKKWQTYRGNSTGTLMVFFGNVDSSGIKHNIFNPPIIARYIRLHPTHYSIRSTLRMELMGCDLNSCSMPLGMESKAISDAQITASSYFTNMFATWSPSKARLHLQGRSNAWRPQVNNPKEWLQVDFQKTMKVTGVTTQGVKSLLTSMYVKEFLISSSQDGHQWTLFFQNGKVKVFQGNQDSFTPVVNSLDPPLLTRYLRIHPQSWVHQIALRMEVLGCEAQDLY

SEQ ID NO: 2647 - DNA, 4371 bp, synthetic construct
  misc_feature 1..4371: note = Variant of human B-domain deleted Factor VIII
  source 1..4371: mol_type = other DNA
atgcagattgaactgtctacctgcttcttcctctgtttgctgaggttctgctttagcgccactagacggtactaccttggcgctgtggagctgtcctgggactatatgcagagtgatttgggagagcttcccgtcgacgcacgatttcctcctcgcgttccaaagtcatttcccttcaacacaagcgtggtgtacaagaagacgctcttcgtcgaattcaccgatcacctgttcaatatcgccaaacccagaccaccatggatgggtcttttggggcctaccatacaagcggaggtgtatgacacagttgttatcactctcaagaacatggcttctcatccggtaagtcttcacgcagtgggcgtgtcctactggaaagcttcagaaggagccgagtatgatgatcagacatcccagagggagaaagaagacgacaaggtatttccaggtgggtctcatacctatgtgtggcaagtgctcaaagagaatggccctatggcaagcgatccgctctgtttgacttacagctacctttcacacgttgacctcgtcaaggacctcaactccgggttgattggagccttgttggtatgcagggaaggatctcttgccaaagagaagacacagaccctccacaagtttatccttctctttgctgtgttcgatgagggcaaaagttggcatagcgaaacgaagaattccctcatgcaggatcgcgacgcagccagcgccagagcttggcccaagatgcacactgtgaacggatatgtcaataggtcacttcctggcttgattgggtgtcatcggaaaagtgtctactggcacgtgatcggaatggggacaacaccagaggtccactccatatttctcgaaggccataccttccttgttcgaaaccacagacaggcatccttggagatctctcccattacctttctcactgcccaaacgctccttatggacttgggtcagttccttctcttctgccatatcagctcacaccagcatgatggtatggaagcttatgtgaaagtcgacagttgtcctgaggagccacagttgcgcatgaagaataatgaagaagccgaggattacgacgacgatctcaccgattctgagatggacgtggtgaggtttgatgacgacaactctccctccttcattcaaatccggagcgtggcgaagaaacaccccaagacttgggtccactatatagcggcggaagaggaggattgggattacgctcctcttgtattggcaccagatgaccgctcatacaaaagccagtacctcaacaacggaccgcagagaattggccggaagtataagaaagtgcgatttatggcctatacagacgaaacctttaagacaagggaggccatccagcatgagagtgggattttgggacctcttctttacggcgaagttggtgataccctcctcatcatcttcaagaatcaagcttctcgcccctataacatttacccacacgggatcactgacgttaggcctttgtatagcagaagacttcccaaaggcgtgaagcatctcaaagacttccccattttgccaggcgagatctttaagtacaaatggaccgtcacagtggaagatggaccgactaaatcagaccctcgatgccttacgcggtactattcctccttcgtgaatatggagagagatttggcaagcggactcataggaccactcctcatctgttacaaggaatctgtagaccagaggggtaaccagattatgagtgataaacgcaatgtgatcctttttagcgtcttcgacgagaaccggtcctggtacttgaccgagaatatacaaaggttccttcccaaccccgcaggcgttcagttggaagaccctgagtttcaggccagcaatattatgcactcaatcaacggctatgtgtttgatagtctccagctttctgtttgcctccatgaagtagcctattggtacatcttgtcaattggtgctcaaacagacttcctctccgtcttcttctccggctacacctttaagcacaagatggtgtatgaggacactctcacactctttccattttctggagaaaccgtgttcatggagatggagaatccaggcctttggatcttgggttgccacaacagtgattttcgcaatcggggaatgactgctctcctcaaagtcagcagctgtgataagaacacaggcgactattacgaagattcttacgaggacataagtgcctacttgttgtccaagaataacgccattgagcccagatcattctcccagaatcctcccgtgcttaaaaggcatcagcgcgaaatcaccagaactactcttcagtctgatcaagaggagattgactatgacgacaccataagcgtggaaatgaagaaggaggatttcgatatctatgacgaagatgagaaccagtctccgcggagctttcagaagaagacgcgacactacttcattgcagcagtcgaaaggctttgggactacggtatgtcatcatcccctcatgtgttgcgcaatagagctcagagtggaagtgttccacagttcaagaaagtcgtctttcaagagtttacagatggcagcttcacacagcctctctatcggggcgagcttaacgaacatttgggactccttggtccctatatccgagccgaagtggaggacaacattatggttacctttaggaatcaagcctctcgcccctacagcttctactcctccctcatcagttatgaggaggatcagagacaaggcgctgaaccacggaagaactttgtgaaaccgaatgagacgaagacctacttctggaaagtacagcaccacatggcccccacaaaagacgaattcgattgcaaagcatgggcgtatttttcagacgttgacttggagaaagatgtacattcaggacttattggtcctttgttggtgtgtcacactaacactctcaatccagcccatggcaggcaggtgacagtccaggaattcgctcttttctttaccatctttgatgagaccaagtcctggtacttcacggaaaacatggagcgcaattgcagagccccctgtaacatacagatggaggaccctacctttaaggaaaattatcggttccacgcaatcaacggatacattatggatacactccctggccttgtgatggctcaggaccaacgaatcaggtggtacctcctcagcatgggttctaatgagaacatacactccattcacttttcaggacatgtgttcactgtccggaagaaagaagagtataagatggccctctacaatttgtatccaggcgtgtttgagaccgttgaaatgcttccctctaaagctggcatctggagagtagagtgcttgatcggagaacatcttcacgcaggtatgagcaccttgttcctcgtgtacagcaacaaatgtcagaccccacttggcatggccagtggacacattcgcgactttcagatcacagcatctggccagtatggacaatgggccccaaagttggctcgcctccattactccggtagcataaatgcgtggtccactaaagaacctttcagctggattaaggtcgatcttcttgcccccatgatcatccacggcattaagacacagggagcgaggcagaaattctcctccctctacatctcacagttcattattatgtatagtttggacggcaagaagtggcaaacttatagaggtaacagtactggaacactcatggtgttcttcggcaacgttgatagctctggcatcaaacacaacatctttaatcctcccataatagctcggtacatcagattgcatccgacccactacagcattaggagtacactccgaatggagcttatgggttgcgacttgaattcctgttcaatgccactcggaatggagtctaaagccatctctgatgcacagataaccgccagtagctactttacgaacatgtttgctacgtggtcaccctctaaggcaaggcttcatttgcaaggccggtctaatgcctggagacctcaggtgaacaacccgaaagaatggctccaggtggactttcagaagaccatgaaagtaacaggtgtcactactcagggagttaagtccttgctcaccagcatgtatgtgaaggagttccttatttcctcatcacaagatggccaccagtggaccctcttctttcagaatggtaaggtcaaagtgtttcagggcaatcaagacagcttcacacccgtggtgaacagtcttgatcctccactcttgacacgataccttcgaatccatccacagtcttgggttcaccagattgcattgcgcatggaagtacttggatgcgaggctcaggacctctac

SEQ ID NO: 2648 - protein, 1457 aa, synthetic construct
  REGION 1..1457: note = Variant of human B-domain deleted Factor VIII
MQIELSTCFFLCLLRFCFSATRRYYLGAVELSWDYMQSDLGELPVDARFPPRVPKSFPFNTSVVYKKTLFVEFTDHLFNIAKPRPPWMGLLGPTIQAEVYDTVVITLKNMASHPVSLHAVGVSYWKASEGAEYDDQTSQREKEDDKVFPGGSHTYVWQVLKENGPMASDPLCLTYSYLSHVDLVKDLNSGLIGALLVCREGSLAKEKTQTLHKFILLFAVFDEGKSWHSETKNSLMQDRDAASARAWPKMHTVNGYVNRSLPGLIGCHRKSVYWHVIGMGTTPEVHSIFLEGHTFLVRNHRQASLEISPITFLTAQTLLMDLGQFLLFCHISSHQHDGMEAYVKVDSCPEEPQLRMKNNEEAEDYDDDLTDSEMDVVRFDDDNSPSFIQIRSVAKKHPKTWVHYIAAEEEDWDYAPLVLAPDDRSYKSQYLNNGPQRIGRKYKKVRFMAYTDETFKTREAIQHESGILGPLLYGEVGDTLLIIFKNQASRPYNIYPHGITDVRPLYSRRLPKGVKHLKDFPILPGEIFKYKWTVTVEDGPTKSDPRCLTRYYSSFVNMERDLASGLIGPLLICYKESVDQRGNQIMSDKRNVILFSVFDENRSWYLTENIQRFLPNPAGVQLEDPEFQASNIMHSINGYVFDSLQLSVCLHEVAYWYILSIGAQTDFLSVFFSGYTFKHKMVYEDTLTLFPFSGETVFMEMENPGLWILGCHNSDFRNRGMTALLKVSSCDKNTGDYYEDSYEDISAYLLSKNNAIEPRSFSQNPPVLKRHQREITRTTLQSDQEEIDYDDTISVEMKKEDFDIYDEDENQSPRSFQKKTRHYFIAAVERLWDYGMSSSPHVLRNRAQSGSVPQFKKVVFQEFTDGSFTQPLYRGELNEHLGLLGPYIRAEVEDNIMVTFRNQASRPYSFYSSLISYEEDQRQGAEPRKNFVKPNETKTYFWKVQHHMAPTKDEFDCKAWAYFSDVDLEKDVHSGLIGPLLVCHTNTLNPAHGRQVTVQEFALFFTIFDETKSWYFTENMERNCRAPCNIQMEDPTFKENYRFHAINGYIMDTLPGLVMAQDQRIRWYLLSMGSNENIHSIHFSGHVFTVRKKEEYKMALYNLYPGVFETVEMLPSKAGIWRVECLIGEHLHAGMSTLFLVYSNKCQTPLGMASGHIRDFQITASGQYGQWAPKLARLHYSGSINAWSTKEPFSWIKVDLLAPMIIHGIKTQGARQKFSSLYISQFIIMYSLDGKKWQTYRGNSTGTLMVFFGNVDSSGIKHNIFNPPIIARYIRLHPTHYSIRSTLRMELMGCDLNSCSMPLGMESKAISDAQITASSYFTNMFATWSPSKARLHLQGRSNAWRPQVNNPKEWLQVDFQKTMKVTGVTTQGVKSLLTSMYVKEFLISSSQDGHQWTLFFQNGKVKVFQGNQDSFTPVVNSLDPPLLTRYLRIHPQSWVHQIALRMEVLGCEAQDLY

SEQ ID NO: 2649 - DNA, 4371 bp, synthetic construct
  misc_feature 1..4371: note = Variant of human B-domain deleted Factor VIII
  source 1..4371: mol_type = other DNA
atgcagattgaactgtctacctgcttcttcctctgtttgctgaggttctgctttagcgccactagacggtactaccttggcgctgtggagctgtcctgggactatatgcagagtgatttgggagagcttcccgtcgacgcacgatttcctcctcgcgttccaaagtcatttcccttcaacacaagcgtggtgtacaagaagacgctcttcgtcgaattcaccgatcacctgttcaatatcgccaaacccagaccaccatggatgggtcttttggggcctaccatacaagcggaggtgtatgacacagttgttatcactctcaagaacatggcttctcatccggtaagtcttcacgcagtgggcgtgtcctactggaaagcttcagaaggagccgagtatgatgatcagacatcccagagggagaaagaagacgacaaggtatttccaggtgggtctcatacctatgtgtggcaagtgctcaaagagaatggccctatggcaagcgatccgctctgtttgacttacagctacctttcacacgttgacctcgtcaaggacctcaactccgggttgattggagccttgttggtatgcagggaaggatctcttgccaaagagaagacacagaccctccacaagtttatccttctctttgctgtgttcgatgagggcaaaagttggcatagcgaaacgaagaattccctcatgcaggatcgcgacgcagccagcgccagagcttggcccaagatgcacactgtgaacggatatgtcaataggtcacttcctggcttgattgggtgtcatcggaaaagtgtctactggcacgtgatcggaatggggacaacaccagaggtccactccatatttctcgaaggccataccttccttgttcgaaaccacagacaggcatccttggagatctctcccattacctttctcactgcccaaacgctccttatggacttgggtcagttccttctcttctgccatatctattcacaccagcatgatggtatggaagcttatgtgaaagtcgacagttgtcctgaggagccacagttgcgcatgaagaataatgaagaagccgaggattacgacgacgatctcaccgattctgagatggacgtggtgaggtttgatgacgacaactctccctccttcattcaaatccggagcgtggcgaagaaacaccccaagacttgggtccactatatagcggcggaagaggaggattgggattacgctcctcttgtattggcaccagatgaccgctcatacaaaagccagtacctcaacaacggaccgcagagaattggccggaagtataagaaagtgcgatttatggcctatacagacgaaacctttaagacaagggaggccatccagcatgagagtgggattttgggacctcttctttacggcgaagttggtgataccctcctcatcatcttcaagaatcaagcttctcgcccctataacatttacccacacgggatcactgacgttaggcctttgtatagcagaagacttcccaaaggcgtgaagcatctcaaagacttccccattttgccaggcgagatctttaagtacaaatggaccgtcacagtggaagatggaccgactaaatcagaccctcgatgccttacgcggtactattcctccttcgtgaatatggagagagatttggcaagcggactcataggaccactcctcatctgttacaaggaatctgtagaccagaggggtaaccagattatgagtgataaacgcaatgtgatcctttttagcgtcttcgacgagaaccggtcctggtacttgaccgagaatatacaaaggttccttcccaaccccgcaggcgttcagttggaagaccctgagtttcaggccagcaatattatgcactcaatcaacggctatgtgtttgatagtctccagctttctgtttgcctccatgaagtagcctattggtacatcttgtcaattggtgctcaaacagacttcctctccgtcttcttctccggctacacctttaagcacaagatggtgtatgaggacactctcacactctttccattttctggagaaaccgtgttcatgagcatggagaatccaggcctttggatcttgggttgccacaacagtgattttcgcaatcggggaatgactgctctcctcaaagtcagcagctgtgataagaacacaggcgactattacgaagattcttacgaggacataagtgcctacttgttgtccaagaataacgccattgagcccagatcattctcccagaatcctcccgtgcttaaaaggcatcagcgcgaaatcaccagaactactcttcagtctgatcaagaggagattgactatgacgacaccataagcgtggaaatgaagaaggaggatttcgatatctatgacgaagatgagaaccagtctccgcggagctttcagaagaagacgcgacactacttcattgcagcagtcgaaaggctttgggactacggtatgtcatcatcccctcatgtgttgcgcaatagagctcagagtggaagtgttccacagttcaagaaagtcgtctttcaagagtttacagatggcagcttcacacagcctctctatcggggcgagcttaacgaacatttgggactccttggtccctatatccgagccgaagtggaggacaacattatggttacctttaggaatcaagcctctcgcccctacagcttctactcctccctcatcagttatgaggaggatcagagacaaggcgctgaaccacggaagaactttgtgaaaccgaatgagacgaagacctacttctggaaagtacagcaccacatggcccccacaaaagacgaattcgattgcaaagcatgggcgtatttttcagacgttgacttggagaaagatgtacattcaggacttattggtcctttgttggtgtgtcacactaacactctcaatccagcccatggcaggcaggtgacagtccaggaattcgctcttttctttaccatctttgatgagaccaagtcctggtacttcacggaaaacatggagcgcaattgcagagccccctgtaacatacagatggaggaccctacctttaaggaaaattatcggttccacgcaatcaacggatacattatggatacactccctggccttgtgatggctcaggaccaacgaatcaggtggtacctcctcagcatgggttctaatgagaacatacactccattcacttttcaggacatgtgttcactgtccggaagaaagaagagtataagatggccctctacaatttgtatccaggcgtgtttgagaccgttgaaatgcttccctctaaagctggcatctggagagtagagtgcttgatcggagaacatcttcacgcaggtatgagcaccttgttcctcgtgtacagcaacaaatgtcagaccccacttggcatggccagtggacacattcgcgactttcagatcacagcatctggccagtatggacaatgggccccaaagttggctcgcctccattactccggtagcataaatgcgtggtccactaaagaacctttcagctggattaaggtcgatcttcttgcccccatgatcatccacggcattaagacacagggagcgaggcagaaattctcctccctctacatctcacagttcattattatgtatagtttggacggcaagaagtggcaaacttatagaggtaacagtactggaacactcatggtgttcttcggcaacgttgatagctctggcatcaaacacaacatctttaatcctcccataatagctcggtacatcagattgcatccgacccactacagcattaggagtacactccgaatggagcttatgggttgcgacttgaattcctgttcaatgccactcggaatggagtctaaagccatctctgatgcacagataaccgccagtagctactttacgaacatgtttgctacgtggtcaccctctaaggcaaggcttcatttgcaaggccggtctaatgcctggagacctcaggtgaacaacccgaaagaatggctccaggtggactttcagaagaccatgaaagtaacaggtgtcactactcagggagttaagtccttgctcaccagcatgtatgtgaaggagttccttatttcctcatcacaagatggccaccagtggaccctcttctttcagaatggtaaggtcaaagtgtttcagggcaatcaagacagcttcacacccgtggtgaacagtcttgatcctccactcttgacacgataccttcgaatccatccacagtcttgggttcaccagattgcattgcgcatggaagtacttggatgcgaggctcaggacctctac

SEQ ID NO: 2650 - protein, 1457 aa, synthetic construct
  REGION 1..1457: note = Variant of human B-domain deleted Factor VIII
MQIELSTCFFLCLLRFCFSATRRYYLGAVELSWDYMQSDLGELPVDARFPPRVPKSFPFNTSVVYKKTLFVEFTDHLFNIAKPRPPWMGLLGPTIQAEVYDTVVITLKNMASHPVSLHAVGVSYWKASEGAEYDDQTSQREKEDDKVFPGGSHTYVWQVLKENGPMASDPLCLTYSYLSHVDLVKDLNSGLIGALLVCREGSLAKEKTQTLHKFILLFAVFDEGKSWHSETKNSLMQDRDAASARAWPKMHTVNGYVNRSLPGLIGCHRKSVYWHVIGMGTTPEVHSIFLEGHTFLVRNHRQASLEISPITFLTAQTLLMDLGQFLLFCHIYSHQHDGMEAYVKVDSCPEEPQLRMKNNEEAEDYDDDLTDSEMDVVRFDDDNSPSFIQIRSVAKKHPKTWVHYIAAEEEDWDYAPLVLAPDDRSYKSQYLNNGPQRIGRKYKKVRFMAYTDETFKTREAIQHESGILGPLLYGEVGDTLLIIFKNQASRPYNIYPHGITDVRPLYSRRLPKGVKHLKDFPILPGEIFKYKWTVTVEDGPTKSDPRCLTRYYSSFVNMERDLASGLIGPLLICYKESVDQRGNQIMSDKRNVILFSVFDENRSWYLTENIQRFLPNPAGVQLEDPEFQASNIMHSINGYVFDSLQLSVCLHEVAYWYILSIGAQTDFLSVFFSGYTFKHKMVYEDTLTLFPFSGETVFMSMENPGLWILGCHNSDFRNRGMTALLKVSSCDKNTGDYYEDSYEDISAYLLSKNNAIEPRSFSQNPPVLKRHQREITRTTLQSDQEEIDYDDTISVEMKKEDFDIYDEDENQSPRSFQKKTRHYFIAAVERLWDYGMSSSPHVLRNRAQSGSVPQFKKVVFQEFTDGSFTQPLYRGELNEHLGLLGPYIRAEVEDNIMVTFRNQASRPYSFYSSLISYEEDQRQGAEPRKNFVKPNETKTYFWKVQHHMAPTKDEFDCKAWAYFSDVDLEKDVHSGLIGPLLVCHTNTLNPAHGRQVTVQEFALFFTIFDETKSWYFTENMERNCRAPCNIQMEDPTFKENYRFHAINGYIMDTLPGLVMAQDQRIRWYLLSMGSNENIHSIHFSGHVFTVRKKEEYKMALYNLYPGVFETVEMLPSKAGIWRVECLIGEHLHAGMSTLFLVYSNKCQTPLGMASGHIRDFQITASGQYGQWAPKLARLHYSGSINAWSTKEPFSWIKVDLLAPMIIHGIKTQGARQKFSSLYISQFIIMYSLDGKKWQTYRGNSTGTLMVFFGNVDSSGIKHNIFNPPIIARYIRLHPTHYSIRSTLRMELMGCDLNSCSMPLGMESKAISDAQITASSYFTNMFATWSPSKARLHLQGRSNAWRPQVNNPKEWLQVDFQKTMKVTGVTTQGVKSLLTSMYVKEFLISSSQDGHQWTLFFQNGKVKVFQGNQDSFTPVVNSLDPPLLTRYLRIHPQSWVHQIALRMEVLGCEAQDLY

SEQ ID NO: 2651 - DNA, 4371 bp, synthetic construct
  misc_feature 1..4371: note = Variant of human B-domain deleted Factor VIII
  source 1..4371: mol_type = other DNA
atgcagattgaactgtctacctgcttcttcctctgtttgctgaggttctgctttagcgccactagacggtactaccttggcgctgtggagctgtcctgggactatatgcagagtgatttgggagagcttcccgtcgacgcacgatttcctcctcgcgttccaaagtcatttcccttcaacacaagcgtggtgtacaagaagacgctcttcgtcgaattcaccgatcacctgttcaatatcgccaaacccagaccaccatggatgggtcttttggggcctaccatacaagcggaggtgtatgacacagttgttatcactctcaagaacatggcttctcatccggtaagtcttcacgcagtgggcgtgtcctactggaaagcttcagaaggagccgagtatgatgatcagacatcccagagggagaaagaagacgacaaggtatttccaggtgggtctcatacctatgtgtggcaagtgctcaaagagaatggccctatggcaagcgatccgctctgtttgacttacagctacctttcacacgttgacctcgtcaaggacctcaactccgggttgattggagccttgttggtatgcagggaaggatctcttgccaaagagaagacacagaccctccacaagtttatccttctctttgctgtgttcgatgagggcaaaagttggcatagcgaaacgaagaattccctcatgcaggatcgcgacgcagccagcgccagagcttggcccaagatgcacactgtgaacggatatgtcaataggtcacttcctggcttgattgggtgtcatcggaaaagtgtctactggcacgtgatcggaatggggacaacaccagaggtccactccatatttctcgaaggccataccttccttgttcgaaaccacagacaggcatccttggagatctctcccattacctttctcactgcccaaacgctccttatggacttgggtcagttccttctcttctgccatatcagctcacaccagcatgatggtatggaagcttatgtgaaagtcgacagttgtcctgaggagccacagttgcgcatgaagaataatgaagaagccgaggattacgacgacgatctcaccgattctgagatggacgtggtgaggtttgatgacgacaactctccctccttcattcaagtgcggagcgtggcgaagaaacaccccaagacttgggtccactatatagcggcggaagaggaggattgggattacgctcctcttgtattggcaccagatgaccgctcatacaaaagccagtacctcaacaacggaccgcagagaattggccggaagtataagaaagtgcgatttatggcctatacagacgaaacctttaagacaagggaggccatccagcatgagagtgggattttgggacctcttctttacggcgaagttggtgataccctcctcatcatcttcaagaatcaagcttctcgcccctataacatttacccacacgggatcactgacgttaggcctttgtatagcagaagacttcccaaaggcgtgaagcatctcaaagacttccccattttgccaggcgagatctttaagtacaaatggaccgtcacagtggaagatggaccgactaaatcagaccctcgatgccttacgcggtactattcctccttcgtgaatatggagagagatttggcaagcggactcataggaccactcctcatctgttacaaggaatctgtagaccagaggggtaaccagattatgagtgataaacgcaatgtgatcctttttagcgtcttcgacgagaaccggtcctggtacttgaccgagaatatacaaaggttccttcccaaccccgcaggcgttcagttggaagaccctgagtttcaggccagcaatattatgcactcaatcaacggctatgtgtttgatagtctccagctttctgtttgcctccatgaagtagcctattggtacatcttgtcaattggtgctcaaacagacttcctctccgtcttcttctccggctacacctttaagcacaagatggtgtatgaggacactctcacactctttccattttctggagaaaccgtgttcatgagcatggagaatccaggcctttggatcttgggttgccacaacagtgattttcgcaatcggggaatgactgctctcctcaaagtcagcagctgtgataagaacacaggcgactattacgaagattcttacgaggacataagtgcctacttgttgtccaagaataacgccattgagcccagatcattctcccagaatcctcccgtgcttaaaaggcatcagcgcgaaatcaccagaactactcttcagtctgatcaagaggagattgactatgacgacaccataagcgtggaaatgaagaaggaggatttcgatatctatgacgaagatgagaaccagtctccgcggagctttcagaagaagacgcgacactacttcattgcagcagtcgaaaggctttgggactacggtatgtcatcatcccctcatgtgttgcgcaatagagctcagagtggaagtgttccacagttcaagaaagtcgtctttcaagagtttacagatggcagcttcacacagcctctctatcggggcgagcttaacgaacatttgggactccttggtccctatatccgagccgaagtggaggacaacattatggttacctttaggaatcaagcctctcgcccctacagcttctactcctccctcatcagttatgaggaggatcagagacaaggcgctgaaccacggaagaactttgtgaaaccgaatgagacgaagacctacttctggaaagtacagcaccacatggcccccacaaaagacgaattcgattgcaaagcatgggcgtatttttcagacgttgacttggagaaagatgtacattcaggacttattggtcctttgttggtgtgtcacactaacactctcaatccagcccatggcaggcaggtgacagtccaggaattcgctcttttctttaccatctttgatgagaccaagtcctggtacttcacggaaaacatggagcgcaattgcagagccccctgtaacatacagatggaggaccctacctttaaggaaaattatcggttccacgcaatcaacggatacattatggatacactccctggccttgtgatggctcaggaccaacgaatcaggtggtacctcctcagcatgggttctaatgagaacatacactccattcacttttcaggacatgtgttcactgtccggaagaaagaagagtataagatggccctctacaatttgtatccaggcgtgtttgagaccgttgaaatgcttccctctaaagctggcatctggagagtagagtgcttgatcggagaacatcttcacgcaggtatgagcaccttgttcctcgtgtacagcaacaaatgtcagaccccacttggcatggccagtggacacattcgcgactttcagatcacagcatctggccagtatggacaatgggccccaaagttggctcgcctccattactccggtagcataaatgcgtggtccactaaagaacctttcagctggattaaggtcgatcttcttgcccccatgatcatccacggcattaagacacagggagcgaggcagaaattctcctccctctacatctcacagttcattattatgtatagtttggacggcaagaagtggcaaacttatagaggtaacagtactggaacactcatggtgttcttcggcaacgttgatagctctggcatcaaacacaacatctttaatcctcccataatagctcggtacatcagattgcatccgacccactacagcattaggagtacactccgaatggagcttatgggttgcgacttgaattcctgttcaatgccactcggaatggagtctaaagccatctctgatgcacagataaccgccagtagctactttacgaacatgtttgctacgtggtcaccctctaaggcaaggcttcatttgcaaggccggtctaatgcctggagacctcaggtgaacaacccgaaagaatggctccaggtggactttcagaagaccatgaaagtaacaggtgtcactactcagggagttaagtccttgctcaccagcatgtatgtgaaggagttccttatttcctcatcacaagatggccaccagtggaccctcttctttcagaatggtaaggtcaaagtgtttcagggcaatcaagacagcttcacacccgtggtgaacagtcttgatcctccactcttgacacgataccttcgaatccatccacagtcttgggttcaccagattgcattgcgcatggaagtacttggatgcgaggctcaggacctctac

SEQ ID NO: 2652 - protein, 1457 aa, synthetic construct
  REGION 1..1457: note = Variant of human B-domain deleted Factor VIII
MQIELSTCFFLCLLRFCFSATRRYYLGAVELSWDYMQSDLGELPVDARFPPRVPKSFPFNTSVVYKKTLFVEFTDHLFNIAKPRPPWMGLLGPTIQAEVYDTVVITLKNMASHPVSLHAVGVSYWKASEGAEYDDQTSQREKEDDKVFPGGSHTYVWQVLKENGPMASDPLCLTYSYLSHVDLVKDLNSGLIGALLVCREGSLAKEKTQTLHKFILLFAVFDEGKSWHSETKNSLMQDRDAASARAWPKMHTVNGYVNRSLPGLIGCHRKSVYWHVIGMGTTPEVHSIFLEGHTFLVRNHRQASLEISPITFLTAQTLLMDLGQFLLFCHISSHQHDGMEAYVKVDSCPEEPQLRMKNNEEAEDYDDDLTDSEMDVVRFDDDNSPSFIQVRSVAKKHPKTWVHYIAAEEEDWDYAPLVLAPDDRSYKSQYLNNGPQRIGRKYKKVRFMAYTDETFKTREAIQHESGILGPLLYGEVGDTLLIIFKNQASRPYNIYPHGITDVRPLYSRRLPKGVKHLKDFPILPGEIFKYKWTVTVEDGPTKSDPRCLTRYYSSFVNMERDLASGLIGPLLICYKESVDQRGNQIMSDKRNVILFSVFDENRSWYLTENIQRFLPNPAGVQLEDPEFQASNIMHSINGYVFDSLQLSVCLHEVAYWYILSIGAQTDFLSVFFSGYTFKHKMVYEDTLTLFPFSGETVFMSMENPGLWILGCHNSDFRNRGMTALLKVSSCDKNTGDYYEDSYEDISAYLLSKNNAIEPRSFSQNPPVLKRHQREITRTTLQSDQEEIDYDDTISVEMKKEDFDIYDEDENQSPRSFQKKTRHYFIAAVERLWDYGMSSSPHVLRNRAQSGSVPQFKKVVFQEFTDGSFTQPLYRGELNEHLGLLGPYIRAEVEDNIMVTFRNQASRPYSFYSSLISYEEDQRQGAEPRKNFVKPNETKTYFWKVQHHMAPTKDEFDCKAWAYFSDVDLEKDVHSGLIGPLLVCHTNTLNPAHGRQVTVQEFALFFTIFDETKSWYFTENMERNCRAPCNIQMEDPTFKENYRFHAINGYIMDTLPGLVMAQDQRIRWYLLSMGSNENIHSIHFSGHVFTVRKKEEYKMALYNLYPGVFETVEMLPSKAGIWRVECLIGEHLHAGMSTLFLVYSNKCQTPLGMASGHIRDFQITASGQYGQWAPKLARLHYSGSINAWSTKEPFSWIKVDLLAPMIIHGIKTQGARQKFSSLYISQFIIMYSLDGKKWQTYRGNSTGTLMVFFGNVDSSGIKHNIFNPPIIARYIRLHPTHYSIRSTLRMELMGCDLNSCSMPLGMESKAISDAQITASSYFTNMFATWSPSKARLHLQGRSNAWRPQVNNPKEWLQVDFQKTMKVTGVTTQGVKSLLTSMYVKEFLISSSQDGHQWTLFFQNGKVKVFQGNQDSFTPVVNSLDPPLLTRYLRIHPQSWVHQIALRMEVLGCEAQDLY

SEQ ID NO: 2653 - DNA, 4371 bp, synthetic construct
  misc_feature 1..4371: note = Variant of human B-domain deleted Factor VIII
  source 1..4371: mol_type = other DNA
atgcagattgaactgtctacctgcttcttcctctgtttgctgaggttctgctttagcgccactagacggtactaccttggcgctgtggagctgtcctgggactatatgcagagtgatttgggagagcttcccgtcgacgcacgatttcctcctcgcgttccaaagtcatttcccttcaacacaagcgtggtgtacaagaagacgctcttcgtcgaattcaccgatcacctgttcaatatcgccaaacccagaccaccatggatgggtcttttggggcctaccatacaagcggaggtgtatgacacagttgttatcactctcaagaacatggcttctcatccggtaagtcttcacgcagtgggcgtgtcctactggaaagcttcagaaggagccgagtatgatgatcagacatcccagagggagaaagaagacgacaaggtatttccaggtgggtctcatacctatgtgtggcaagtgctcaaagagaatggccctatggcaagcgatccgctctgtttgacttacagctacctttcacacgttgacctcgtcaaggacctcaactccgggttgattggagccttgttggtatgcagggaaggatctcttgccaaagagaagacacagaccctccacaagtttatccttctctttgctgtgttcgatgagggcaaaagttggcatagcgaaacgaagaattccctcatgcaggatcgcgacgcagccagcgccagagcttggcccaagatgcacactgtgaacggatatgtcaataggtcacttcctggcttgattgggtgtcatcggaaaagtgtctactggcacgtgatcggaatggggacaacaccagaggtccactccatatttctcgaaggccataccttccttgttcgaaaccacagacaggcatccttggagatctctcccattacctttctcactgcccaaacgctccttatggacttgggtcagttccttctcttctgccatatcagctcacaccagcatgatggtatggaagcttatgtgaaagtcgacagttgtcctgaggagccacagttgcgcatgaagaataatgaagaagccgaggattacgacgacgatctcaccgattctgagatggacgtggtgaggtttgatgacgacaactctccctccttcattcaaatccggagcgtggcgaagaaacaccccaagacttgggtccactatatagcggcggaagaggaggattgggattacgctcctcttgtattggcaccagatgaccgctcatacaaaagccagtacctcaacaacggaccgcagagaattggccggaagtataagaaagtgcgatttatggcctatacagacgaaacctttaagacaagggaggccatccagcatgagagtgggattttgggacctcttctttacggcgaagttggtgataccctcctcatcatcttcaagaatcaagcttctcgcccctataacatttacccacacgggatcactgacgttaggcctttgtatagcagaagacttcccaaaggcgtgaagcatctcaaagacttccccattttgccaggcgagatctttaagtacaaatggaccgtcacagtggaagatggaccgactaaatcagaccctcgatgccttacgcggtactattcctccttcgtgaatatggagagagatttggcaagcggactcataggaccactcctcatctgttacaaggaatctgtagaccagaggggtaaccagattatgagtgataaacgcaatgtgatcctttttagcgtcttcgacgagaaccggtcctggtacttgaccgagaatatacaaaggttccttcccaaccccgcaggcgttcagttggaagaccctgagtttcaggccagcaatattatgcactcaatcaacggctatgtgtttgatagtctccagctttctgtttgcctccatgaagtagcctattggtacatcttgtcaattggtgctcaaacagacttcctctccgtcttcttctccggctacacctttaagcacaagggggtgtatgaggacactctcacactctttccattttctggagaaaccgtgttcatgagcatggagaatccaggcctttggatcttgggttgccacaacagtgattttcgcaatcggggaatgactgctctcctcaaagtcagcagctgtgataagaacacaggcgactattacgaagattcttacgaggacataagtgcctacttgttgtccaagaataacgccattgagccaagatcattctcccagaatcctcccgtgcttaaaaggcatcagcgcgaaatcaccagaactactcttcagtctgatcaagaggagattgactatgacgacaccataagcgtggaaatgaagaaggaggatttcgatatctatgacgaagatgagaaccagtctccgcggagctttcagaagaagacgcgacactacttcattgcagcagtcgaaaggctttgggactacggtatgtcatcatcccctcatgtgttgcgcaatagagctcagagtggaagtgttccacagttcaagaaagtcgtctttcaagagtttacagatggcagcttcacacagcctctctatcggggcgagcttaacgaacatttgggactccttggtccctatatccgagccgaagtggaggacaacattatggttacctttaggaatcaagcctctcgcccctacagcttctactcctccctcatcagttatgaggaggatcagagacaaggcgctgaaccacggaagaactttgtgaaaccgaatgagacgaagacctacttctggaaagtacagcaccacatggcccccacaaaagacgaattcgattgcaaagcatgggcgtatttttcagacgttgacttggagaaagatgtacattcaggacttattggtcctttgttggtgtgtcacactaacactctcaatccagcccatggcaggcaggtgacagtccaggaattcgctcttttctttaccatctttgatgagaccaagtcctggtacttcacggaaaacatggagcgcaattgcagagccccctgtaacatacagatggaggaccctacctttaaggaaaattatcggttccacgcaatcaacggatacattatggatacactccctggccttgtgatggctcaggaccaacgaatcaggtggtacctcctcagcatgggttctaatgagaacatacactccattcacttttcaggacatgtgttcactgtccggaagaaagaagagtataagatggccctctacaatttgtatccaggcgtgtttgagaccgttgaaatgcttccctctaaagctggcatctggagagtagagtgcttgatcggagaacatcttcacgcaggtatgagcaccttgttcctcgtgtacagcaacaaatgtcagaccccacttggcatggccagtggacacattcgcgactttcagatcacagcatctggccagtatggacaatgggccccaaagttggctcgcctccattactccggtagcataaatgcgtggtccactaaagaacctttcagctggattaaggtcgatcttcttgcccccatgatcatccacggcattaagacacagggagcgaggcagaaattctcctccctctacatctcacagttcattattatgtatagtttggacggcaagaagtggcaaacttatagaggtaacagtactggaacactcatggtgttcttcggcaacgttgatagctctggcatcaaacacaacatctttaatcctcccataatagctcggtacatcagattgcatccgacccactacagcattaggagtacactccgaatggagcttatgggttgcgacttgaattcctgttcaatgccactcggaatggagtctaaagccatctctgatgcacagataaccgccagtagctactttacgaacatgtttgctacgtggtcaccctctaaggcaaggcttcatttgcaaggccggtctaatgcctggagacctcaggtgaacaacccgaaagaatggctccaggtggactttcagaagaccatgaaagtaacaggtgtcactactcagggagttaagtccttgctcaccagcatgtatgtgaaggagttccttatttcctcatcacaagatggccaccagtggaccctcttctttcagaatggtaaggtcaaagtgtttcagggcaatcaagacagcttcacacccgtggtgaacagtcttgatcctccactcttgacacgataccttcgaatccatccacagtcttgggttcaccagattgcattgcgcatggaagtacttggatgcgaggctcaggacctctac

SEQ ID NO: 2654 - protein, 1457 aa, synthetic construct
  REGION 1..1457: note = Variant of human B-domain deleted Factor VIII
MQIELSTCFFLCLLRFCFSATRRYYLGAVELSWDYMQSDLGELPVDARFPPRVPKSFPFNTSVVYKKTLFVEFTDHLFNIAKPRPPWMGLLGPTIQAEVYDTVVITLKNMASHPVSLHAVGVSYWKASEGAEYDDQTSQREKEDDKVFPGGSHTYVWQVLKENGPMASDPLCLTYSYLSHVDLVKDLNSGLIGALLVCREGSLAKEKTQTLHKFILLFAVFDEGKSWHSETKNSLMQDRDAASARAWPKMHTVNGYVNRSLPGLIGCHRKSVYWHVIGMGTTPEVHSIFLEGHTFLVRNHRQASLEISPITFLTAQTLLMDLGQFLLFCHISSHQHDGMEAYVKVDSCPEEPQLRMKNNEEAEDYDDDLTDSEMDVVRFDDDNSPSFIQIRSVAKKHPKTWVHYIAAEEEDWDYAPLVLAPDDRSYKSQYLNNGPQRIGRKYKKVRFMAYTDETFKTREAIQHESGILGPLLYGEVGDTLLIIFKNQASRPYNIYPHGITDVRPLYSRRLPKGVKHLKDFPILPGEIFKYKWTVTVEDGPTKSDPRCLTRYYSSFVNMERDLASGLIGPLLICYKESVDQRGNQIMSDKRNVILFSVFDENRSWYLTENIQRFLPNPAGVQLEDPEFQASNIMHSINGYVFDSLQLSVCLHEVAYWYILSIGAQTDFLSVFFSGYTFKHKGVYEDTLTLFPFSGETVFMSMENPGLWILGCHNSDFRNRGMTALLKVSSCDKNTGDYYEDSYEDISAYLLSKNNAIEPRSFSQNPPVLKRHQREITRTTLQSDQEEIDYDDTISVEMKKEDFDIYDEDENQSPRSFQKKTRHYFIAAVERLWDYGMSSSPHVLRNRAQSGSVPQFKKVVFQEFTDGSFTQPLYRGELNEHLGLLGPYIRAEVEDNIMVTFRNQASRPYSFYSSLISYEEDQRQGAEPRKNFVKPNETKTYFWKVQHHMAPTKDEFDCKAWAYFSDVDLEKDVHSGLIGPLLVCHTNTLNPAHGRQVTVQEFALFFTIFDETKSWYFTENMERNCRAPCNIQMEDPTFKENYRFHAINGYIMDTLPGLVMAQDQRIRWYLLSMGSNENIHSIHFSGHVFTVRKKEEYKMALYNLYPGVFETVEMLPSKAGIWRVECLIGEHLHAGMSTLFLVYSNKCQTPLGMASGHIRDFQITASGQYGQWAPKLARLHYSGSINAWSTKEPFSWIKVDLLAPMIIHGIKTQGARQKFSSLYISQFIIMYSLDGKKWQTYRGNSTGTLMVFFGNVDSSGIKHNIFNPPIIARYIRLHPTHYSIRSTLRMELMGCDLNSCSMPLGMESKAISDAQITASSYFTNMFATWSPSKARLHLQGRSNAWRPQVNNPKEWLQVDFQKTMKVTGVTTQGVKSLLTSMYVKEFLISSSQDGHQWTLFFQNGKVKVFQGNQDSFTPVVNSLDPPLLTRYLRIHPQSWVHQIALRMEVLGCEAQDLY

SEQ ID NO: 2655 - DNA, 4371 bp, synthetic construct
  misc_feature 1..4371: note = Variant of human B-domain deleted Factor VIII
  source 1..4371: mol_type = other DNA
atgcagattgaactgtctacctgcttcttcctctgtttgctgaggttctgctttagcgccactagacggtactaccttggcgctgtggagctgtcctgggactatatgcagagtgatttgggagagcttcccgtcgacgcacgatttcctcctcgcgttccaaagtcatttcccttcaacacaagcgtggtgtacaagaagacgctcttcgtcgaattcaccgatcacctgttcaatatcgccaaacccagaccaccatggatgggtcttttggggcctaccatacaagcggaggtgtatgacacagttgttatcactctcaagaacatggcttctcatccggtaagtcttcacgcagtgggcgtgtcctactggaaagcttcagaaggagccgagtatgatgatcagacatcccagagggagaaagaagacgacaaggtatttccaggtgggtctcatacctatgtgtggcaagtgctcaaagagaatggccctatggcaagcgatccgctctgtttgacttacagctacctttcacacgttgacctcgtcaaggacctcaactccgggttgattggagccttgttggtatgcagggaaggatctcttgccaaagagaagacacagaccctccacaagtttatccttctctttgctgtgttcgatgagggcaaaagttggcatagcgaaacgaagaattccctcatgcaggatcgcgacgcagccagcgccagagcttggcccaagatgcacactgtgaacggatatgtcaataggtcacttcctggcttgattgggtgtcatcggaaaagtgtctactggcacgtgatcggaatggggacaacaccagaggtccactccatatttctcgaaggccataccttccttgttcgaaaccacagacaggcatccttggagatctctcccattacctttctcactgcccaaacgctccttatggacttgggtcagttccttctcttctgccatatcagctcacaccagcatgatggtatggaagcttatgtgaaagtcgacagttgtcctgaggagccacagttgcgcatgaagaataatgaagaagccgaggattacgacgacgatctcaccgattctgagatggacgtggtgaggtttgatgacgacaactctccctccttcattcaaatccggagcgtggcgaagaaacaccccaagacttgggtccactatatagcggcggaagaggaggattgggattacgctcctcttgtattggcaccagatgaccgctcatacaaaagccagtacctcaacaacggaccgcagagaattggccggaagtataagaaagtgcgatttatggcctatacagacgaaacctttaagacaagggaggccatccagcatgagagtgggattttgggacctcttctttacggcgaagttggtgataccctcctcatcatcttcaagaatcaagcttctcgcccctataacatttacccacacgggatcactgacgttaggcctttgtatagcagaagacttcccaaaggcgtgaagcatctcaaagacttccccattttgccaggcgagatctttaagtacaaatggaccgtcacagtggaagatggaccgactaaatcagaccctcgatgccttacgcggtactattcctccttcgtgaatcaggagagagatttggcaagcggactcataggaccactcctcatctgttacaaggaatctgtagaccagaggggtaaccagattatgagtgataaacgcaatgtgatcctttttagcgtcttcgacgagaaccggtcctggtacttgaccgagaatatacaaaggttccttcccaaccccgcaggcgttcagttggaagaccctgagtttcaggccagcaatattatgcactcaatcaacggctatgtgtttgatagtctccagctttctgtttgcctccatgaagtagcctattggtacatcttgtcaattggtgctcaaacagacttcctctccgtcttcttctccggctacacctttaagcacaagatggtgtatgaggacactctcacactctttccattttctggagaaaccgtgttcatgagcatggagaatccaggcctttggatcttgggttgccacaacagtgattttcgcaatcggggaatgactgctctcctcaaagtcagcagctgtgataagaacacaggcgactattacgaagattcttacgaggacataagtgcctacttgttgtccaagaataacgccattgagcccagatcattctcccagaatcctcccgtgcttaaaaggcatcagcgcgaaatcaccagaactactcttcagtctgatcaagaggagattgactatgacgacaccataagcgtggaaatgaagaaggaggatttcgatatctatgacgaagatgagaaccagtctccgcggagctttcagaagaagacgcgacactacttcattgcagcagtcgaaaggctttgggactacggtatgtcatcatcccctcatgtgttgcgcaatagagctcagagtggaagtgttccacagttcaagaaagtcgtctttcaagagtttacagatggcagcttcacacagcctctctatcggggcgagcttaacgaacatttgggactccttggtccctatatccgagccgaagtggaggacaacattatggttacctttaggaatcaagcctctcgcccctacagcttctactcctccctcatcagttatgaggaggatcagagacaaggcgctgaaccacggaagaactttgtgaaaccgaatgagacgaagacctacttctggaaagtacagcaccacatggcccccacaaaagacgaattcgattgcaaagcatgggcgtatttttcagacgttgacttggagaaagatgtacattcaggacttattggtcctttgttggtgtgtcacactaacactctcaatccagcccatggcaggcaggtgacagtccaggaattcgctcttttctttaccatctttgatgagaccaagtcctggtacttcacggaaaacatggagcgcaattgcagagccccctgtaacatacagatggaggaccctacctttaaggaaaattatcggttccacgcaatcaacggatacattatggatacactccctggccttgtgatggctcaggaccaacgaatcaggtggtacctcctcagcatgggttctaatgagaacatacactccattcacttttcaggacatgtgttcactgtccggaagaaagaagagtataagatggccctctacaatttgtatccaggcgtgtttgagaccgttgaaatgcttccctctaaagctggcatctggagagtagagtgcttgatcggagaacatcttcacgcaggtatgagcaccttgttcctcgtgtacagcaacaaatgtcagaccccacttggcatggccagtggacacattcgcgactttcagatcacagcatctggccagtatggacaatgggccccaaagttggctcgcctccattactccggtagcataaatgcgtggtccactaaagaacctttcagctggattaaggtcgatcttcttgcccccatgatcatccacggcattaagacacagggagcgaggcagaaattctcctccctctacatctcacagttcattattatgtatagtttggacggcaagaagtggcaaacttatagaggtaacagtactggaacactcatggtgttcttcggcaacgttgatagctctggcatcaaacacaacatctttaatcctcccataatagctcggtacatcagattgcatccgacccactacagcattaggagtacactccgaatggagcttatgggttgcgacttgaattcctgttcaatgccactcggaatggagtctaaagccatctctgatgcacagataaccgccagtagctactttacgaacatgtttgctacgtggtcaccctctaaggcaaggcttcatttgcaaggccggtctaatgcctggagacctcaggtgaacaacccgaaagaatggctccaggtggactttcagaagaccatgaaagtaacaggtgtcactactcagggagttaagtccttgctcaccagcatgtatgtgaaggagttccttatttcctcatcacaagatggccaccagtggaccctcttctttcagaatggtaaggtcaaagtgtttcagggcaatcaagacagcttcacacccgtggtgaacagtcttgatcctccactcttgacacgataccttcgaatccatccacagtcttgggttcaccagattgcattgcgcatggaagtacttggatgcgaggctcaggacctctac

SEQ ID NO: 2656 - protein, 1457 aa, synthetic construct
  REGION 1..1457: note = Variant of human B-domain deleted Factor VIII
MQIELSTCFFLCLLRFCFSATRRYYLGAVELSWDYMQSDLGELPVDARFPPRVPKSFPFNTSVVYKKTLFVEFTDHLFNIAKPRPPWMGLLGPTIQAEVYDTVVITLKNMASHPVSLHAVGVSYWKASEGAEYDDQTSQREKEDDKVFPGGSHTYVWQVLKENGPMASDPLCLTYSYLSHVDLVKDLNSGLIGALLVCREGSLAKEKTQTLHKFILLFAVFDEGKSWHSETKNSLMQDRDAASARAWPKMHTVNGYVNRSLPGLIGCHRKSVYWHVIGMGTTPEVHSIFLEGHTFLVRNHRQASLEISPITFLTAQTLLMDLGQFLLFCHISSHQHDGMEAYVKVDSCPEEPQLRMKNNEEAEDYDDDLTDSEMDVVRFDDDNSPSFIQIRSVAKKHPKTWVHYIAAEEEDWDYAPLVLAPDDRSYKSQYLNNGPQRIGRKYKKVRFMAYTDETFKTREAIQHESGILGPLLYGEVGDTLLIIFKNQASRPYNIYPHGITDVRPLYSRRLPKGVKHLKDFPILPGEIFKYKWTVTVEDGPTKSDPRCLTRYYSSFVNQERDLASGLIGPLLICYKESVDQRGNQIMSDKRNVILFSVFDENRSWYLTENIQRFLPNPAGVQLEDPEFQASNIMHSINGYVFDSLQLSVCLHEVAYWYILSIGAQTDFLSVFFSGYTFKHKMVYEDTLTLFPFSGETVFMSMENPGLWILGCHNSDFRNRGMTALLKVSSCDKNTGDYYEDSYEDISAYLLSKNNAIEPRSFSQNPPVLKRHQREITRTTLQSDQEEIDYDDTISVEMKKEDFDIYDEDENQSPRSFQKKTRHYFIAAVERLWDYGMSSSPHVLRNRAQSGSVPQFKKVVFQEFTDGSFTQPLYRGELNEHLGLLGPYIRAEVEDNIMVTFRNQASRPYSFYSSLISYEEDQRQGAEPRKNFVKPNETKTYFWKVQHHMAPTKDEFDCKAWAYFSDVDLEKDVHSGLIGPLLVCHTNTLNPAHGRQVTVQEFALFFTIFDETKSWYFTENMERNCRAPCNIQMEDPTFKENYRFHAINGYIMDTLPGLVMAQDQRIRWYLLSMGSNENIHSIHFSGHVFTVRKKEEYKMALYNLYPGVFETVEMLPSKAGIWRVECLIGEHLHAGMSTLFLVYSNKCQTPLGMASGHIRDFQITASGQYGQWAPKLARLHYSGSINAWSTKEPFSWIKVDLLAPMIIHGIKTQGARQKFSSLYISQFIIMYSLDGKKWQTYRGNSTGTLMVFFGNVDSSGIKHNIFNPPIIARYIRLHPTHYSIRSTLRMELMGCDLNSCSMPLGMESKAISDAQITASSYFTNMFATWSPSKARLHLQGRSNAWRPQVNNPKEWLQVDFQKTMKVTGVTTQGVKSLLTSMYVKEFLISSSQDGHQWTLFFQNGKVKVFQGNQDSFTPVVNSLDPPLLTRYLRIHPQSWVHQIALRMEVLGCEAQDLY

SEQ ID NO: 2657 - DNA, 4371 bp, synthetic construct
  misc_feature 1..4371: note = Variant of human B-domain deleted Factor VIII
  source 1..4371: mol_type = other DNA
atgcagattgaactgtctacctgcttcttcctctgtttgctgaggttctgctttagcgccactagacggtactaccttggcgctgtggagctgtcctgggactatatgcagagtgatttgggagagcttcccgtcgacgcacgatttcctcctcgcgttccaaagtcatttcccttcaacacaagctttgtgtacaagaagacgctcttcgtcgaattcaccgatcacctgttcaatatcgccaaacccagaccaccatggatgggtcttttggggcctaccatacaagcggaggtgtatgacacagttgttatcactctcaagaacatggcttctcatccggtaagtcttcacgcagtgggcgtgtcctactggaaagcttcagaaggagccgagtatgatgatcagacatcccagagggagaaagaagacgacaaggtatttccaggtgggtctcatacctatgtgtggcaagtgctcaaagagaatggccctatggcaagcgatccgctctgtttgacttacagctacctttcacacgttgacctcgtcaaggacctcaactccgggttgattggagccttgttggtatgcagggaaggatctcttgccaaagagaagacacagaccctccacaagtttatccttctctttgctgtgttcgatgagggcaaaagttggcatagcgaaacgaagaattccctcatgcaggatcgcgacgcagccagcgccagagcttggcccaagatgcacactgtgaacggatatgtcaataggtcacttcctggcttgattgggtgtcatcggaaaagtgtctactggcacgtgatcggaatggggacaacaccagaggtccactccatatttctcgaaggccataccttccttgttcgaaaccacagacaggcatccttggagatctctcccattacctttctcactgcccaaacgctccttatggacttgggtcagttccttctcttctgccatatcagctcacaccagcatgatggtatggaagcttatgtgaaagtcgacagttgtcctgaggagccacagttgcgcatgaagaataatgaagaagccgaggattacgacgacgatctcaccgattctgagatggacgtggtgaggtttgatgacgacaactctccctccttcattcaaatccggagcgtggcgaagaaacaccccaagacttgggtccactatatagcggcggaagaggaggattgggattacgctcctcttgtattggcaccagatgaccgctcatacaaaagccagtacctcaacaacggaccgcagagaattggccggaagtataagaaagtgcgatttatggcctatacagacgaaacctttaagacaagggaggccatccagcatgagagtgggattttgggacctcttctttacggcgaagttggtgataccctcctcatcatcttcaagaatcaagcttctcgcccctataacatttacccacacgggatcactgacgttaggcctttgtatagcagaagacttcccaaaggcgtgaagcatctcaaagacttccccattttgccaggcgagatctttaagtacaaatggaccgtcacagtggaagatggaccgactaaatcagaccctcgatgccttacgcggtactattcctccttcgtgaatatggagagagatttggcaagcggactcataggaccactcctcatctgttacaaggaatctgtagaccagaggggtaaccagattatgagtgataaacgcaatgtgatcctttttagcgtcttcgacgagaaccggtcctggtacttgaccgagaatatacaaaggttccttcccaaccccgcaggcgttcagttggaagaccctgagtttcaggccagcaatattatgcactcaatcaacggctatgtgtttgatagtctccagctttctgtttgcctccatgaagtagcctattggtacatcttgtcaattggtgctcaaacagacttcctctccgtcttcttctccggctacacctttaagcacaagatggtgtatgaggacactctcacactctttccattttctggagaaaccgtgttcatgagcatggagaatccaggcctttggatcttgggttgccacaacagtgattttcgcaatcggggaatgactgctctcctcaaagtcagcagctgtgataagaacacaggcgactattacgaagattcttacgaggacataagtgcctacttgttgtccaagaataacgccattgagcccagatcattctcccagaatcctcccgtgcttaaaaggcatcagcgcgaaatcaccagaactactcttcagtctgatcaagaggagattgactatgacgacaccataagcgtggaaatgaagaaggaggatttcgatatctatgacgaagatgagaaccagtctccgcggagctttcagaagaagacgcgacactacttcattgcagcagtcgaaaggctttgggactacggtatgtcatcatcccctcatgtgttgcgcaatagagctcagagtggaagtgttccacagttcaagaaagtcgtctttcaagagtttacagatggcagcttcacacagcctctctatcggggcgagcttaacgaacatttgggactccttggtccctatatccgagccgaagtggaggacaacattatggttacctttaggaatcaagcctctcgcccctacagcttctactcctccctcatcagttatgaggaggatcagagacaaggcgctgaaccacggaagaactttgtgaaaccgaatgagacgaagacctacttctggaaagtacagcaccacatggcccccacaaaagacgaattcgattgcaaagcatgggcgtatttttcagacgttgacttggagaaagatgtacattcaggacttattggtcctttgttggtgtgtcacactaacactctcaatccagcccatggcaggcaggtgacagtccaggaattcgctcttttctttaccatctttgatgagaccaagtcctggtacttcacggaaaacatggagcgcaattgcagagccccctgtaacatacagatggaggaccctacctttaaggaaaattatcggttccacgcaatcaacggatacattatggatacactccctggccttgtgatggctcaggaccaacgaatcaggtggtacctcctcagcatgggttctaatgagaacatacactccattcacttttcaggacatgtgttcactgtccggaagaaagaagagtataagatggccctctacaatttgtatccaggcgtgtttgagaccgttgaaatgcttccctctaaagctggcatctggagagtagagtgcttgatcggagaacatcttcacgcaggtatgagcaccttgttcctcgtgtacagcaacaaatgtcagaccccacttggcatggccagtggacacattcgcgactttcagatcacagcatctggccagtatggacaatgggccccaaagttggctcgcctccattactccggtagcataaatgcgtggtccactaaagaacctttcagctggattaaggtcgatcttcttgcccccatgatcatccacggcattaagacacagggagcgaggcagaaattctcctccctctacatctcacagttcattattatgtatagtttggacggcaagaagtggcaaacttatagaggtaacagtactggaacactcatggtgttcttcggcaacgttgatagctctggcatcaaacacaacatctttaatcctcccataatagctcggtacatcagattgcatccgacccactacagcattaggagtacactccgaatggagcttatgggttgcgacttgaattcctgttcaatgccactcggaatggagtctaaagccatctctgatgcacagataaccgccagtagctactttacgaacatgtttgctacgtggtcaccctctaaggcaaggcttcatttgcaaggccggtctaatgcctggagacctcaggtgaacaacccgaaagaatggctccaggtggactttcagaagaccatgaaagtaacaggtgtcactactcagggagttaagtccttgctcaccagcatgtatgtgaaggagttccttatttcctcatcacaagatggccaccagtggaccctcttctttcagaatggtaaggtcaaagtgtttcagggcaatcaagacagcttcacacccgtggtgaacagtcttgatcctccactcttgacacgataccttcgaatccatccacagtcttgggttcaccagattgcattgcgcatggaagtacttggatgcgaggctcaggacctctac

SEQ ID NO: 2658 - protein, 1457 aa, synthetic construct
  REGION 1..1457: note = Variant of human B-domain deleted Factor VIII
MQIELSTCFFLCLLRFCFSATRRYYLGAVELSWDYMQSDLGELPVDARFPPRVPKSFPFNTSFVYKKTLFVEFTDHLFNIAKPRPPWMGLLGPTIQAEVYDTVVITLKNMASHPVSLHAVGVSYWKASEGAEYDDQTSQREKEDDKVFPGGSHTYVWQVLKENGPMASDPLCLTYSYLSHVDLVKDLNSGLIGALLVCREGSLAKEKTQTLHKFILLFAVFDEGKSWHSETKNSLMQDRDAASARAWPKMHTVNGYVNRSLPGLIGCHRKSVYWHVIGMGTTPEVHSIFLEGHTFLVRNHRQASLEISPITFLTAQTLLMDLGQFLLFCHISSHQHDGMEAYVKVDSCPEEPQLRMKNNEEAEDYDDDLTDSEMDVVRFDDDNSPSFIQIRSVAKKHPKTWVHYIAAEEEDWDYAPLVLAPDDRSYKSQYLNNGPQRIGRKYKKVRFMAYTDETFKTREAIQHESGILGPLLYGEVGDTLLIIFKNQASRPYNIYPHGITDVRPLYSRRLPKGVKHLKDFPILPGEIFKYKWTVTVEDGPTKSDPRCLTRYYSSFVNMERDLASGLIGPLLICYKESVDQRGNQIMSDKRNVILFSVFDENRSWYLTENIQRFLPNPAGVQLEDPEFQASNIMHSINGYVFDSLQLSVCLHEVAYWYILSIGAQTDFLSVFFSGYTFKHKMVYEDTLTLFPFSGETVFMSMENPGLWILGCHNSDFRNRGMTALLKVSSCDKNTGDYYEDSYEDISAYLLSKNNAIEPRSFSQNPPVLKRHQREITRTTLQSDQEEIDYDDTISVEMKKEDFDIYDEDENQSPRSFQKKTRHYFIAAVERLWDYGMSSSPHVLRNRAQSGSVPQFKKVVFQEFTDGSFTQPLYRGELNEHLGLLGPYIRAEVEDNIMVTFRNQASRPYSFYSSLISYEEDQRQGAEPRKNFVKPNETKTYFWKVQHHMAPTKDEFDCKAWAYFSDVDLEKDVHSGLIGPLLVCHTNTLNPAHGRQVTVQEFALFFTIFDETKSWYFTENMERNCRAPCNIQMEDPTFKENYRFHAINGYIMDTLPGLVMAQDQRIRWYLLSMGSNENIHSIHFSGHVFTVRKKEEYKMALYNLYPGVFETVEMLPSKAGIWRVECLIGEHLHAGMSTLFLVYSNKCQTPLGMASGHIRDFQITASGQYGQWAPKLARLHYSGSINAWSTKEPFSWIKVDLLAPMIIHGIKTQGARQKFSSLYISQFIIMYSLDGKKWQTYRGNSTGTLMVFFGNVDSSGIKHNIFNPPIIARYIRLHPTHYSIRSTLRMELMGCDLNSCSMPLGMESKAISDAQITASSYFTNMFATWSPSKARLHLQGRSNAWRPQVNNPKEWLQVDFQKTMKVTGVTTQGVKSLLTSMYVKEFLISSSQDGHQWTLFFQNGKVKVFQGNQDSFTPVVNSLDPPLLTRYLRIHPQSWVHQIALRMEVLGCEAQDLY

SEQ ID NO: 2659 - DNA, 4371 bp, synthetic construct
  misc_feature 1..4371: note = Variant of human B-domain deleted Factor VIII
  source 1..4371: mol_type = other DNA
atgcagattgaactgtctacctgcttcttcctctgtttgctgaggttctgctttagcgccactagacggtactaccttggcgctgtggagctgtcctgggactatatgcagagtgatttgggagagcttcccgtcgacgcacgatttcctcctcgcgttccaaagtcatttcccttcaacacaagcgtggtgtacaagaagacgctcttcgtcgaattcaccgatcacctgttcaatatcgccaaacccagaccaccatggatgggtcttttggggcctaccatacaagcggaggtgtatgacacagttgttatcactctcaagaacatggcttctcatccggtaagtcttcacgcagtgggcgtgtcctactggaaagcttcagaaggagccgagtatgatgatcagacatcccagagggagaaagaagacgacaaggtatttccaggtgggtctcatacctatgtgtggcaagtgctcaaagagaatggccctatggcaagcgatccgctctgtttgacttacagctacctttcacacgttgacctcgtcaaggacctcaactccgggttgattggagccttgttggtatgcagggaaggatctcttgccaaagagaagacacagaccctccacaagtttatccttctctttgctgtgttcgatgagggcaaaagttggcatagcgaaacgaagaattccctcatgcaggatcgcgacgcagccagcgccagagcttggcccaagatgcacactgtgaacggatatgtcaataggtcacttcctggcttgattgggtgtcatcggaaaagtgtctactggcacgtgatcggaatggggacaacaccagaggtccactccatatttctcgaaggccataccttccttgttcgaaaccacagacaggcatccttggagatctctcccattacctttctcactgcccaaacgctccttatggacttgggtcagttccttctcttctgccatatcagctcacaccagcatgatggtatggaagcttatgtgaaagtcgacagttgtcctgaggagccacagttgcgcatgaagaataatgaagaagccgaggattacgacgacgatctcaccgattctgagatggacgtggtgaggtttgatgacgacaactctccctccttcattcaaatccggagcgtggcgaagaaacaccccaagacttgggtccactatatagcggcggaagaggaggattgggattacgctcctcttgtattggcaccagatgaccgctcatacaaaagccagtacctcaacaacggaccgcagagaattggccggaagtataagaaagtgcgatttatggcctatacagacgaaacctttaagacaagggaggccatccagcatgagagtgggattttgggacctcttctttacggcgaagttggtgataccctcctcatcatcttcaagaatcaagcttctcgcccctataacatttacccacacgggatcactgacgttaggcctttgtatagcagaagacttcccaaaggcgtgaagcatctcaaagacttccccattttgccaggcgagatctttaagtacaaatggaccgtcacagtggaagatggaccgactaaatcagaccctcgatgccttacgcggtactattcctccttcgtgaatatggagagagatttggcaagcggactcataggaccactcctcatctgttacaaggaatctgtagaccagaggggtaaccagattatgagtgataaacgcaatgtgatcctttttagcgtcttcgacgagaaccggtcctggtacttgaccgagaatatacaaaggttccttcccaaccccgcaggcgttcagttggaagaccctgagtttcaggccagcaatattatgcactcaatcaacggctatgtgtttgatagtctccagctttctgtttgcctccatgaagtagcctattggtacatcttgtcaattggtgctcaaacagacttcctctccgtcttcttctccggctacacctttaagcacaagatggtgtatgaggacactctcacactctttccattttctggagaaaccgtgttcatgagcatggagaatccaggcctttggatcttgggttgccacaacagtgattttcgcaatcggggaatgactgctctcctcaaagtcagcagctgtgataagaacacaggcgactattacgaagattcttacgaggacataagtgcctacttgttgtccaagaataacgccattgagcccagatcattctcccagaatcctcccgtgcttaaaaggcatcagcgcgaaatcaccagaactactcttcagtctgatcaagaggagattgactatgacgacaccataagcgtggaaatgaagaaggaggatttcgatatctatgacgaagattggaaccagtctccgcggagctttcagaagaagacgcgacactacttcattgcagcagtcgaaaggctttgggactacggtatgtcatcatcccctcatgtgttgcgcaatagagctcagagtggaagtgttccacagttcaagaaagtcgtctttcaagagtttacagatggcagcttcacacagcctctctatcggggcgagcttaacgaacatttgggactccttggtccctatatccgagccgaagtggaggacaacattatggttacctttaggaatcaagcctctcgcccctacagcttctactcctccctcatcagttatgaggaggatcagagacaaggcgctgaaccacggaagaactttgtgaaaccgaatgagacgaagacctacttctggaaagtacagcaccacatggcccccacaaaagacgaattcgattgcaaagcatgggcgtatttttcagacgttgacttggagaaagatgtacattcaggacttattggtcctttgttggtgtgtcacactaacactctcaatccagcccatggcaggcaggtgacagtccaggaattcgctcttttctttaccatctttgatgagaccaagtcctggtacttcacggaaaacatggagcgcaattgcagagccccctgtaacatacagatggaggaccctacctttaaggaaaattatcggttccacgcaatcaacggatacattatggatacactccctggccttgtgatggctcaggaccaacgaatcaggtggtacctcctcagcatgggttctaatgagaacatacactccattcacttttcaggacatgtgttcactgtccggaagaaagaagagtataagatggccctctacaatttgtatccaggcgtgtttgagaccgttgaaatgcttccctctaaagctggcatctggagagtagagtgcttgatcggagaacatcttcacgcaggtatgagcaccttgttcctcgtgtacagcaacaaatgtcagaccccacttggcatggccagtggacacattcgcgactttcagatcacagcatctggccagtatggacaatgggccccaaagttggctcgcctccattactccggtagcataaatgcgtggtccactaaagaacctttcagctggattaaggtcgatcttcttgcccccatgatcatccacggcattaagacacagggagcgaggcagaaattctcctccctctacatctcacagttcattattatgtatagtttggacggcaagaagtggcaaacttatagaggtaacagtactggaacactcatggtgttcttcggcaacgttgatagctctggcatcaaacacaacatctttaatcctcccataatagctcggtacatcagattgcatccgacccactacagcattaggagtacactccgaatggagcttatgggttgcgacttgaattcctgttcaatgccactcggaatggagtctaaagccatctctgatgcacagataaccgccagtagctactttacgaacatgtttgctacgtggtcaccctctaaggcaaggcttcatttgcaaggccggtctaatgcctggagacctcaggtgaacaacccgaaagaatggctccaggtggactttcagaagaccatgaaagtaacaggtgtcactactcagggagttaagtccttgctcaccagcatgtatgtgaaggagttccttatttcctcatcacaagatggccaccagtggaccctcttctttcagaatggtaaggtcaaagtgtttcagggcaatcaagacagcttcacacccgtggtgaacagtcttgatcctccactcttgacacgataccttcgaatccatccacagtcttgggttcaccagattgcattgcgcatggaagtacttggatgcgaggctcaggacctctac

SEQ ID NO: 2660 - protein, 1457 aa, synthetic construct
  REGION 1..1457: note = Variant of human B-domain deleted Factor VIII
MQIELSTCFFLCLLRFCFSATRRYYLGAVELSWDYMQSDLGELPVDARFPPRVPKSFPFNTSVVYKKTLFVEFTDHLFNIAKPRPPWMGLLGPTIQAEVYDTVVITLKNMASHPVSLHAVGVSYWKASEGAEYDDQTSQREKEDDKVFPGGSHTYVWQVLKENGPMASDPLCLTYSYLSHVDLVKDLNSGLIGALLVCREGSLAKEKTQTLHKFILLFAVFDEGKSWHSETKNSLMQDRDAASARAWPKMHTVNGYVNRSLPGLIGCHRKSVYWHVIGMGTTPEVHSIFLEGHTFLVRNHRQASLEISPITFLTAQTLLMDLGQFLLFCHISSHQHDGMEAYVKVDSCPEEPQLRMKNNEEAEDYDDDLTDSEMDVVRFDDDNSPSFIQIRSVAKKHPKTWVHYIAAEEEDWDYAPLVLAPDDRSYKSQYLNNGPQRIGRKYKKVRFMAYTDETFKTREAIQHESGILGPLLYGEVGDTLLIIFKNQASRPYNIYPHGITDVRPLYSRRLPKGVKHLKDFPILPGEIFKYKWTVTVEDGPTKSDPRCLTRYYSSFVNMERDLASGLIGPLLICYKESVDQRGNQIMSDKRNVILFSVFDENRSWYLTENIQRFLPNPAGVQLEDPEFQASNIMHSINGYVFDSLQLSVCLHEVAYWYILSIGAQTDFLSVFFSGYTFKHKMVYEDTLTLFPFSGETVFMSMENPGLWILGCHNSDFRNRGMTALLKVSSCDKNTGDYYEDSYEDISAYLLSKNNAIEPRSFSQNPPVLKRHQREITRTTLQSDQEEIDYDDTISVEMKKEDFDIYDEDWNQSPRSFQKKTRHYFIAAVERLWDYGMSSSPHVLRNRAQSGSVPQFKKVVFQEFTDGSFTQPLYRGELNEHLGLLGPYIRAEVEDNIMVTFRNQASRPYSFYSSLISYEEDQRQGAEPRKNFVKPNETKTYFWKVQHHMAPTKDEFDCKAWAYFSDVDLEKDVHSGLIGPLLVCHTNTLNPAHGRQVTVQEFALFFTIFDETKSWYFTENMERNCRAPCNIQMEDPTFKENYRFHAINGYIMDTLPGLVMAQDQRIRWYLLSMGSNENIHSIHFSGHVFTVRKKEEYKMALYNLYPGVFETVEMLPSKAGIWRVECLIGEHLHAGMSTLFLVYSNKCQTPLGMASGHIRDFQITASGQYGQWAPKLARLHYSGSINAWSTKEPFSWIKVDLLAPMIIHGIKTQGARQKFSSLYISQFIIMYSLDGKKWQTYRGNSTGTLMVFFGNVDSSGIKHNIFNPPIIARYIRLHPTHYSIRSTLRMELMGCDLNSCSMPLGMESKAISDAQITASSYFTNMFATWSPSKARLHLQGRSNAWRPQVNNPKEWLQVDFQKTMKVTGVTTQGVKSLLTSMYVKEFLISSSQDGHQWTLFFQNGKVKVFQGNQDSFTPVVNSLDPPLLTRYLRIHPQSWVHQIALRMEVLGCEAQDLY

SEQ ID NO: 2661 - DNA, 4371 bp, synthetic construct
  misc_feature 1..4371: note = Variant of human B-domain deleted Factor VIII
  source 1..4371: mol_type = other DNA
atgcagattgaactgtctacctgcttcttcctctgtttgctgaggttctgctttagcgccactagacggtactaccttggcgctgtggagctgtcctgggactatatgcagagtgatttgggagagcttcccgtcgacgcacgatttcctcctcgcgttccaaagtcatttcccttcaacacaagcgtggtgtacaagaagacgctcttcgtcgaattcaccgatcacctgttcaatatcgccaaacccagaccaccatggatgggtcttttggggcctaccatacaagcggaggtgtatgacacagttgttatcactctcaagaacatggcttctcatccggtaagtcttcacgcagtgggcgtgtcctactggaaagcttcagaaggagccgagtatgatgatcagacatcccagagggagaaagaagacgacaaggtatttccaggtgggtctcatacctatgtgtggcaagtgctcaaagagaatggccctatggcaagcgatccgctctgtttgacttacagctacctttcacacgttgacctcgtcaaggacctcaactccgggttgattggagccttgttggtatgcagggaaggatctcttgccaaagagaagacacagaccctccacaagtttatccttctctttgctgtgttcgatgagggcaaaagttggcatagcgaaacgaagaattccctcatgcaggatcgcgacgcagccagcgccagagcttggcccaagatgcacactgtgaacggatatgtcaataggtcacttcctggcttgattgggtgtcatcggaaaagtgtctactggcacgtgatcggaatggggacaacaccagaggtccactccatatttctcgaaggccataccttccttgttcgaaaccacagacaggcatccttggagatctctcccattacctttctcactgcccaaacgctccttatggacttgggtcagttccttctcttctgccatatcagctcacaccagcatgatggtatggaagcttatgtgaaagtcgacagttgtcctgaggagccacagttgcgcatgaagaataatgaagaagccgaggattacgacgacgatctcaccgattctgagatggacgtggtgaggtttgatgacgacaactctccctccttcattcaaatccggagcgtggcgaagaaacaccccaagacttgggtccactatatagcggcggaagaggaggattgggattacgctcctcttgtattggcaccagatgaccgctcatacaaaagccagtacctcaacaacggaccgcagagaattggccggaagtataagaaagtgcgatttatggcctatacagacgaaacctttaagacaagggaggccatccagcatgagagtgggattttgggacctcttctttacggcgaagttggtgataccctcctcatcatcttcaagaatcaagcttctcgcccctataacatttacccacacgggatcactgacgttaggcctttgtatagcagaagacttcccaaaggcgtgaagcatctcaaagacttccccattttgccaggcgagatctttaagtacaaatggaccgtcacagtggaagatggaccgactaaatcagaccctcgatgccttacgcggtactattcctccttcgtgaatgaggagagagatttggcaagcggactcataggaccactcctcatctgttacaaggaatctgtagaccagaggggtaaccagattatgagtgataaacgcaatgtgatcctttttagcgtcttcgacgagaaccggtcctggtacttgaccgagaatatacaaaggttccttcccaaccccgcaggcgttcagttggaagaccctgagtttcaggccagcaatattatgcactcaatcaacggctatgtgtttgatagtctccagctttctgtttgcctccatgaagtagcctattggtacatcttgtcaattggtgctcaaacagacttcctctccgtcttcttctccggctacacctttaagcacaagatggtgtatgaggacactctcacactctttccattttctggagaaaccgtgttcatgagcatggagaatccaggcctttggatcttgggttgccacaacagtgattttcgcaatcggggaatgactgctctcctcaaagtcagcagctgtgataagaacacaggcgactattacgaagattcttacgaggacataagtgcctacttgttgtccaagaataacgccattgagcccagatcattctcccagaatcctcccgtgcttaaaaggcatcagcgcgaaatcaccagaactactcttcagtctgatcaagaggagattgactatgacgacaccataagcgtggaaatgaagaaggaggatttcgatatctatgacgaagatgagaaccagtctccgcggagctttcagaagaagacgcgacactacttcattgcagcagtcgaaaggctttgggactacggtatgtcatcatcccctcatgtgttgcgcaatagagctcagagtggaagtgttccacagttcaagaaagtcgtctttcaagagtttacagatggcagcttcacacagcctctctatcggggcgagcttaacgaacatttgggactccttggtccctatatccgagccgaagtggaggacaacattatggttacctttaggaatcaagcctctcgcccctacagcttctactcctccctcatcagttatgaggaggatcagagacaaggcgctgaaccacggaagaactttgtgaaaccgaatgagacgaagacctacttctggaaagtacagcaccacatggcccccacaaaagacgaattcgattgcaaagcatgggcgtatttttcagacgttgacttggagaaagatgtacattcaggacttattggtcctttgttggtgtgtcacactaacactctcaatccagcccatggcaggcaggtgacagtccaggaattcgctcttttctttaccatctttgatgagaccaagtcctggtacttcacggaaaacatggagcgcaattgcagagccccctgtaacatacagatggaggaccctacctttaaggaaaattatcggttccacgcaatcaacggatacattatggatacactccctggccttgtgatggctcaggaccaacgaatcaggtggtacctcctcagcatgggttctaatgagaacatacactccattcacttttcaggacatgtgttcactgtccggaagaaagaagagtataagatggccctctacaatttgtatccaggcgtgtttgagaccgttgaaatgcttccctctaaagctggcatctggagagtagagtgcttgatcggagaacatcttcacgcaggtatgagcaccttgttcctcgtgtacagcaacaaatgtcagaccccacttggcatggccagtggacacattcgcgactttcagatcacagcatctggccagtatggacaatgggccccaaagttggctcgcctccattactccggtagcataaatgcgtggtccactaaagaacctttcagctggattaaggtcgatcttcttgcccccatgatcatccacggcattaagacacagggagcgaggcagaaattctcctccctctacatctcacagttcattattatgtatagtttggacggcaagaagtggcaaacttatagaggtaacagtactggaacactcatggtgttcttcggcaacgttgatagctctggcatcaaacacaacatctttaatcctcccataatagctcggtacatcagattgcatccgacccactacagcattaggagtacactccgaatggagcttatgggttgcgacttgaattcctgttcaatgccactcggaatggagtctaaagccatctctgatgcacagataaccgccagtagctactttacgaacatgtttgctacgtggtcaccctctaaggcaaggcttcatttgcaaggccggtctaatgcctggagacctcaggtgaacaacccgaaagaatggctccaggtggactttcagaagaccatgaaagtaacaggtgtcactactcagggagttaagtccttgctcaccagcatgtatgtgaaggagttccttatttcctcatcacaagatggccaccagtggaccctcttctttcagaatggtaaggtcaaagtgtttcagggcaatcaagacagcttcacacccgtggtgaacagtcttgatcctccactcttgacacgataccttcgaatccatccacagtcttgggttcaccagattgcattgcgcatggaagtacttggatgcgaggctcaggacctctac

SEQ ID NO: 2662 - protein, 1457 aa, synthetic construct
  REGION 1..1457: note = Variant of human B-domain deleted Factor VIII
MQIELSTCFFLCLLRFCFSATRRYYLGAVELSWDYMQSDLGELPVDARFPPRVPKSFPFNTSVVYKKTLFVEFTDHLFNIAKPRPPWMGLLGPTIQAEVYDTVVITLKNMASHPVSLHAVGVSYWKASEGAEYDDQTSQREKEDDKVFPGGSHTYVWQVLKENGPMASDPLCLTYSYLSHVDLVKDLNSGLIGALLVCREGSLAKEKTQTLHKFILLFAVFDEGKSWHSETKNSLMQDRDAASARAWPKMHTVNGYVNRSLPGLIGCHRKSVYWHVIGMGTTPEVHSIFLEGHTFLVRNHRQASLEISPITFLTAQTLLMDLGQFLLFCHISSHQHDGMEAYVKVDSCPEEPQLRMKNNEEAEDYDDDLTDSEMDVVRFDDDNSPSFIQIRSVAKKHPKTWVHYIAAEEEDWDYAPLVLAPDDRSYKSQYLNNGPQRIGRKYKKVRFMAYTDETFKTREAIQHESGILGPLLYGEVGDTLLIIFKNQASRPYNIYPHGITDVRPLYSRRLPKGVKHLKDFPILPGEIFKYKWTVTVEDGPTKSDPRCLTRYYSSFVNEERDLASGLIGPLLICYKESVDQRGNQIMSDKRNVILFSVFDENRSWYLTENIQRFLPNPAGVQLEDPEFQASNIMHSINGYVFDSLQLSVCLHEVAYWYILSIGAQTDFLSVFFSGYTFKHKMVYEDTLTLFPFSGETVFMSMENPGLWILGCHNSDFRNRGMTALLKVSSCDKNTGDYYEDSYEDISAYLLSKNNAIEPRSFSQNPPVLKRHQREITRTTLQSDQEEIDYDDTISVEMKKEDFDIYDEDENQSPRSFQKKTRHYFIAAVERLWDYGMSSSPHVLRNRAQSGSVPQFKKVVFQEFTDGSFTQPLYRGELNEHLGLLGPYIRAEVEDNIMVTFRNQASRPYSFYSSLISYEEDQRQGAEPRKNFVKPNETKTYFWKVQHHMAPTKDEFDCKAWAYFSDVDLEKDVHSGLIGPLLVCHTNTLNPAHGRQVTVQEFALFFTIFDETKSWYFTENMERNCRAPCNIQMEDPTFKENYRFHAINGYIMDTLPGLVMAQDQRIRWYLLSMGSNENIHSIHFSGHVFTVRKKEEYKMALYNLYPGVFETVEMLPSKAGIWRVECLIGEHLHAGMSTLFLVYSNKCQTPLGMASGHIRDFQITASGQYGQWAPKLARLHYSGSINAWSTKEPFSWIKVDLLAPMIIHGIKTQGARQKFSSLYISQFIIMYSLDGKKWQTYRGNSTGTLMVFFGNVDSSGIKHNIFNPPIIARYIRLHPTHYSIRSTLRMELMGCDLNSCSMPLGMESKAISDAQITASSYFTNMFATWSPSKARLHLQGRSNAWRPQVNNPKEWLQVDFQKTMKVTGVTTQGVKSLLTSMYVKEFLISSSQDGHQWTLFFQNGKVKVFQGNQDSFTPVVNSLDPPLLTRYLRIHPQSWVHQIALRMEVLGCEAQDLY

SEQ ID NO: 2663 - DNA, 4371 bp, synthetic construct
  misc_feature 1..4371: note = Variant of human B-domain deleted Factor VIII
  source 1..4371: mol_type = other DNA
atgcagattgaactgtctacctgcttcttcctctgtttgctgaggttctgctttagcgccactagacggtactaccttggcgctgtggagctgtcctgggactatatgcagagtgatttgggagagcttcccgtcgacgcacgatttcctcctcgcgttccaaagtcatttcccttcaacacaagcgtggtgtacaagaagacgctcttcgtcgaattcaccgatcacctgttcaatatcgccaaacccagaccaccatggatgggtcttttggggcctaccatacaagcggaggtgtatgacacagttgttatcactctcaagaacatggcttctcatccggtaagtcttcacgcagtgggcgtgtcctactggaaagcttcagaaggagccgagtatgatgatcagacatcccagagggagaaagaagacgacaaggtatttccaggtgggtctcatacctatgtgtggcaagtgctcaaagagaatggccctatggcaagcgatccgctctgtttgacttacagctacctttcacacgttgacctcgtcaaggacctcaactccgggttgattggagccttgttggtatgcagggaaggatctcttgccaaagagaagacacagaccctccacaagtttatccttctctttgctgtgttcgatgagggcaaaagttggcatagcgaaacgaagaattccctcatgcaggatcgcgacgcagccagcgccagagcttggcccaagatgcacactgtgaacggatatgtcaataggtcacttcctggcttgattgggtgtcatcggaaaagtgtctactggcacgtgatcggaatggggacaacaccagaggtccactccatatttctcgaaggccataccttccttgttcgaaaccacagacaggcatccttggagatctctcccattacctttctcactgcccaaacgctccttatggacttgggtcagttccttctcttctgccatatcagctcacaccagcatgatggtatggaagcttatgtgaaagtcgacagttgtcctgaggagccacagttgcgcatgaagaataatgaagaagccgaggattacgacgacgatctcaccgattctgagatggacgtggtgaggtttgatgacgacaactctccctccttcattcaaatccggagcgtggcgaagaaacaccccaagacttgggtccactatatagcggcggaagaggaggattgggattacgctcctcttgtattggcaccagatgaccgctcatacaaaagccagtacctcaacaacggaccgcagagaattggccggaagtataagaaagtgcgatttatggcctatacagacgaaacctttaagacaagggaggccatccagcatgagagtgggattttgggacctcttctttacggcgaagttggtgataccctcctcatcatcttcaagaatcaagcttctcgcccctataacatttacccacacgggatcactgacgttaggcctttgtatagcagaagacttcccaaaggcgtgaagcatctcaaagacttccccattttgccaggcgagatctttaagtacaaatggaccgtcacagtggaagatggaccgactaaatcagaccctcgatgccttacgcggtactattcctccttcgtgaatggggagagagatttggcaagcggactcataggaccactcctcatctgttacaaggaatctgtagaccagaggggtaaccagattatgagtgataaacgcaatgtgatcctttttagcgtcttcgacgagaaccggtcctggtacttgaccgagaatatacaaaggttccttcccaaccccgcaggcgttcagttggaagaccctgagtttcaggccagcaatattatgcactcaatcaacggctatgtgtttgatagtctccagctttctgtttgcctccatgaagtagcctattggtacatcttgtcaattggtgctcaaacagacttcctctccgtcttcttctccggctacacctttaagcacaagatggtgtatgaggacactctcacactctttccattttctggagaaaccgtgttcatgagcatggagaatccaggcctttggatcttgggttgccacaacagtgattttcgcaatcggggaatgactgctctcctcaaagtcagcagctgtgataagaacacaggcgactattacgaagattcttacgaggacataagtgcctacttgttgtccaagaataacgccattgagcccagatcattctcccagaatcctcccgtgcttaaaaggcatcagcgcgaaatcaccagaactactcttcagtctgatcaagaggagattgactatgacgacaccataagcgtggaaatgaagaaggaggatttcgatatctatgacgaagatgagaaccagtctccgcggagctttcagaagaagacgcgacactacttcattgcagcagtcgaaaggctttgggactacggtatgtcatcatcccctcatgtgttgcgcaatagagctcagagtggaagtgttccacagttcaagaaagtcgtctttcaagagtttacagatggcagcttcacacagcctctctatcggggcgagcttaacgaacatttgggactccttggtccctatatccgagccgaagtggaggacaacattatggttacctttaggaatcaagcctctcgcccctacagcttctactcctccctcatcagttatgaggaggatcagagacaaggcgctgaaccacggaagaactttgtgaaaccgaatgagacgaagacctacttctggaaagtacagcaccacatggcccccacaaaagacgaattcgattgcaaagcatgggcgtatttttcagacgttgacttggagaaagatgtacattcaggacttattggtcctttgttggtgtgtcacactaacactctcaatccagcccatggcaggcaggtgacagtccaggaattcgctcttttctttaccatctttgatgagaccaagtcctggtacttcacggaaaacatggagcgcaattgcagagccccctgtaacatacagatggaggaccctacctttaaggaaaattatcggttccacgcaatcaacggatacattatggatacactccctggccttgtgatggctcaggaccaacgaatcaggtggtacctcctcagcatgggttctaatgagaacatacactccattcacttttcaggacatgtgttcactgtccggaagaaagaagagtataagatggccctctacaatttgtatccaggcgtgtttgagaccgttgaaatgcttccctctaaagctggcatctggagagtagagtgcttgatcggagaacatcttcacgcaggtatgagcaccttgttcctcgtgtacagcaacaaatgtcagaccccacttggcatggccagtggacacattcgcgactttcagatcacagcatctggccagtatggacaatgggccccaaagttggctcgcctccattactccggtagcataaatgcgtggtccactaaagaacctttcagctggattaaggtcgatcttcttgcccccatgatcatccacggcattaagacacagggagcgaggcagaaattctcctccctctacatctcacagttcattattatgtatagtttggacggcaagaagtggcaaacttatagaggtaacagtactggaacactcatggtgttcttcggcaacgttgatagctctggcatcaaacacaacatctttaatcctcccataatagctcggtacatcagattgcatccgacccactacagcattaggagtacactccgaatggagcttatgggttgcgacttgaattcctgttcaatgccactcggaatggagtctaaagccatctctgatgcacagataaccgccagtagctactttacgaacatgtttgctacgtggtcaccctctaaggcaaggcttcatttgcaaggccggtctaatgcctggagacctcaggtgaacaacccgaaagaatggctccaggtggactttcagaagaccatgaaagtaacaggtgtcactactcagggagttaagtccttgctcaccagcatgtatgtgaaggagttccttatttcctcatcacaagatggccaccagtggaccctcttctttcagaatggtaaggtcaaagtgtttcagggcaatcaagacagcttcacacccgtggtgaacagtcttgatcctccactcttgacacgataccttcgaatccatccacagtcttgggttcaccagattgcattgcgcatggaagtacttggatgcgaggctcaggacctctac

SEQ ID NO: 2664 - protein, 1457 aa, synthetic construct
  REGION 1..1457: note = Variant of human B-domain deleted Factor VIII
MQIELSTCFFLCLLRFCFSATRRYYLGAVELSWDYMQSDLGELPVDARFPPRVPKSFPFNTSVVYKKTLFVEFTDHLFNIAKPRPPWMGLLGPTIQAEVYDTVVITLKNMASHPVSLHAVGVSYWKASEGAEYDDQTSQREKEDDKVFPGGSHTYVWQVLKENGPMASDPLCLTYSYLSHVDLVKDLNSGLIGALLVCREGSLAKEKTQTLHKFILLFAVFDEGKSWHSETKNSLMQDRDAASARAWPKMHTVNGYVNRSLPGLIGCHRKSVYWHVIGMGTTPEVHSIFLEGHTFLVRNHRQASLEISPITFLTAQTLLMDLGQFLLFCHISSHQHDGMEAYVKVDSCPEEPQLRMKNNEEAEDYDDDLTDSEMDVVRFDDDNSPSFIQIRSVAKKHPKTWVHYIAAEEEDWDYAPLVLAPDDRSYKSQYLNNGPQRIGRKYKKVRFMAYTDETFKTREAIQHESGILGPLLYGEVGDTLLIIFKNQASRPYNIYPHGITDVRPLYSRRLPKGVKHLKDFPILPGEIFKYKWTVTVEDGPTKSDPRCLTRYYSSFVNGERDLASGLIGPLLICYKESVDQRGNQIMSDKRNVILFSVFDENRSWYLTENIQRFLPNPAGVQLEDPEFQASNIMHSINGYVFDSLQLSVCLHEVAYWYILSIGAQTDFLSVFFSGYTFKHKMVYEDTLTLFPFSGETVFMSMENPGLWILGCHNSDFRNRGMTALLKVSSCDKNTGDYYEDSYEDISAYLLSKNNAIEPRSFSQNPPVLKRHQREITRTTLQSDQEEIDYDDTISVEMKKEDFDIYDEDENQSPRSFQKKTRHYFIAAVERLWDYGMSSSPHVLRNRAQSGSVPQFKKVVFQEFTDGSFTQPLYRGELNEHLGLLGPYIRAEVEDNIMVTFRNQASRPYSFYSSLISYEEDQRQGAEPRKNFVKPNETKTYFWKVQHHMAPTKDEFDCKAWAYFSDVDLEKDVHSGLIGPLLVCHTNTLNPAHGRQVTVQEFALFFTIFDETKSWYFTENMERNCRAPCNIQMEDPTFKENYRFHAINGYIMDTLPGLVMAQDQRIRWYLLSMGSNENIHSIHFSGHVFTVRKKEEYKMALYNLYPGVFETVEMLPSKAGIWRVECLIGEHLHAGMSTLFLVYSNKCQTPLGMASGHIRDFQITASGQYGQWAPKLARLHYSGSINAWSTKEPFSWIKVDLLAPMIIHGIKTQGARQKFSSLYISQFIIMYSLDGKKWQTYRGNSTGTLMVFFGNVDSSGIKHNIFNPPIIARYIRLHPTHYSIRSTLRMELMGCDLNSCSMPLGMESKAISDAQITASSYFTNMFATWSPSKARLHLQGRSNAWRPQVNNPKEWLQVDFQKTMKVTGVTTQGVKSLLTSMYVKEFLISSSQDGHQWTLFFQNGKVKVFQGNQDSFTPVVNSLDPPLLTRYLRIHPQSWVHQIALRMEVLGCEAQDLY

SEQ ID NO: 2665 - DNA, 4371 bp, synthetic construct
  misc_feature 1..4371: note = Variant of human B-domain deleted Factor VIII
  source 1..4371: mol_type = other DNA
atgcagattgaactgtctacctgcttcttcctctgtttgctgaggttctgctttagcgccactagacggtactaccttggcgctgtggagctgtcctgggactatatgcagagtgatttgggagagcttcccgtcgacgcacgatttcctcctcgcgttccaaagtcatttcccttcaacacaagcgtggtgtacaagaagacgctcttcgtcgaattcaccgatcacctgttcaatatcgccaaacccagaccaccatggatgggtcttttggggcctaccatacaagcggaggtgtatgacacagttgttatcactctcaagaacatggcttctcatccggtaagtcttcacgcagtgggcgtgtcctactggaaagcttcagaaggagccgagtatgatgatcagacatcccagagggagaaagaagacgacaaggtatttccaggtgggtctcatacctatgtgtggcaagtgctcaaagagaatggccctatggcaagcgatccgctctgtttgacttacagctacctttcacacgttgacctcgtcaaggacctcaactccgggttgattggagccttgttggtatgcagggaaggatctcttgccaaagagaagacacagaccctccacaagtttatccttctctttgctgtgttcgatgagggcaaaagttggcatagcgaaacgaagaattccctcatgcaggatcgcgacgcagccagcgccagagcttggcccaagatgcacactgtgaacggatatgtcaataggtcacttcctggcttgattgggtgtcatcggaaaagtgtctactggcacgtgatcggaatggggacaacaccagaggtccactccatatttctcgaaggccataccttccttgttcgaaaccacagacaggcatccttggagatctctcccattacctttctcactgcccaaacgctccttatggacttgggtcagttccttctcttctgccatatcagctcacaccagcatgatggtatggaagcttatgtgaaagtcgacagttgtcctgaggagccacagttgcgcatgaagaataatgaagaagccgaggattacgacgacgatctcaccgattctgagatggacgtggtgaggtttgatgacgacaactctccctccttcattcaaatccggagcgtggcgaagaaacaccccaagacttgggtccactatatagcggcggaagaggaggattgggattacgctcctcttgtattggcaccagatgaccgctcatacaaaagccagtacctcaacaacggaccgcagagaattggccggaagtataagaaagtgcgatttatggcctatacagacgaaacctttaagacaagggaggccatccagcatgagagtgggattttgggacctcttctttacggcgaagttggtgataccctcctcatcatcttcaagaatcaagcttctcgcccctataacatttacccacacgggatcactgacgttaggcctttgtatagcagaagacttcccaaaggcgtgaagcatctcaaagacttccccattttgccaggcgagatctttaagtacaaatggaccgtcacagtggaagatggaccgactaaatcagaccctcgatgccttacgcggtactattcctccttcgtgaatatggagagagatttggcaagcggactcataggaccactcctcatctgttacaaggaatctgtagaccagaggggtaaccagattatgagtgataaacgcaatgtgatcctttttagcgtcttcgacgagaaccggtcctggtacttgaccgagaatatacaaaggttccttcccaaccccgcaggcgttcagttggaagaccctgagtttcaggccagcaatattatgcactcaatcaacggctatgtgtttgatagtctccagctttctgtttgcctccatgaagtagcctattggtacatcttgtcaattggtgctcaaacagacttcctctccgtcttcttctccggctacacctttaagcacaagatggtgtatgaggacactctcacactctttccattttctggagaaaccgtgttcatgagcatggagaatccaggcctttggatcttgggttgccacaacagtgattttcgcaatcggggaatgactgctctcctcaaagtcagcagctgtgataagaacacaggcgactattacgaagattcttacgaggacataagtgcctacattttgtccaagaataacgccattgagcccagatcattctcccagaatcctcccgtgcttaaaaggcatcagcgcgaaatcaccagaactactcttcagtctgatcaagaggagattgactatgacgacaccataagcgtggaaatgaagaaggaggatttcgatatctatgacgaagatgagaaccagtctccgcggagctttcagaagaagacgcgacactacttcattgcagcagtcgaaaggctttgggactacggtatgtcatcatcccctcatgtgttgcgcaatagagctcagagtggaagtgttccacagttcaagaaagtcgtctttcaagagtttacagatggcagcttcacacagcctctctatcggggcgagcttaacgaacatttgggactccttggtccctatatccgagccgaagtggaggacaacattatggttacctttaggaatcaagcctctcgcccctacagcttctactcctccctcatcagttatgaggaggatcagagacaaggcgctgaaccacggaagaactttgtgaaaccgaatgagacgaagacctacttctggaaagtacagcaccacatggcccccacaaaagacgaattcgattgcaaagcatgggcgtatttttcagacgttgacttggagaaagatgtacattcaggacttattggtcctttgttggtgtgtcacactaacactctcaatccagcccatggcaggcaggtgacagtccaggaattcgctcttttctttaccatctttgatgagaccaagtcctggtacttcacggaaaacatggagcgcaattgcagagccccctgtaacatacagatggaggaccctacctttaaggaaaattatcggttccacgcaatcaacggatacattatggatacactccctggccttgtgatggctcaggaccaacgaatcaggtggtacctcctcagcatgggttctaatgagaacatacactccattcacttttcaggacatgtgttcactgtccggaagaaagaagagtataagatggccctctacaatttgtatccaggcgtgtttgagaccgttgaaatgcttccctctaaagctggcatctggagagtagagtgcttgatcggagaacatcttcacgcaggtatgagcaccttgttcctcgtgtacagcaacaaatgtcagaccccacttggcatggccagtggacacattcgcgactttcagatcacagcatctggccagtatggacaatgggccccaaagttggctcgcctccattactccggtagcataaatgcgtggtccactaaagaacctttcagctggattaaggtcgatcttcttgcccccatgatcatccacggcattaagacacagggagcgaggcagaaattctcctccctctacatctcacagttcattattatgtatagtttggacggcaagaagtggcaaacttatagaggtaacagtactggaacactcatggtgttcttcggcaacgttgatagctctggcatcaaacacaacatctttaatcctcccataatagctcggtacatcagattgcatccgacccactacagcattaggagtacactccgaatggagcttatgggttgcgacttgaattcctgttcaatgccactcggaatggagtctaaagccatctctgatgcacagataaccgccagtagctactttacgaacatgtttgctacgtggtcaccctctaaggcaaggcttcatttgcaaggccggtctaatgcctggagacctcaggtgaacaacccgaaagaatggctccaggtggactttcagaagaccatgaaagtaacaggtgtcactactcagggagttaagtccttgctcaccagcatgtatgtgaaggagttccttatttcctcatcacaagatggccaccagtggaccctcttctttcagaatggtaaggtcaaagtgtttcagggcaatcaagacagcttcacacccgtggtgaacagtcttgatcctccactcttgacacgataccttcgaatccatccacagtcttgggttcaccagattgcattgcgcatggaagtacttggatgcgaggctcaggacctctac

SEQ ID NO: 2666 - protein, 1457 aa, synthetic construct
  REGION 1..1457: note = Variant of human B-domain deleted Factor VIII
MQIELSTCFFLCLLRFCFSATRRYYLGAVELSWDYMQSDLGELPVDARFPPRVPKSFPFNTSVVYKKTLFVEFTDHLFNIAKPRPPWMGLLGPTIQAEVYDTVVITLKNMASHPVSLHAVGVSYWKASEGAEYDDQTSQREKEDDKVFPGGSHTYVWQVLKENGPMASDPLCLTYSYLSHVDLVKDLNSGLIGALLVCREGSLAKEKTQTLHKFILLFAVFDEGKSWHSETKNSLMQDRDAASARAWPKMHTVNGYVNRSLPGLIGCHRKSVYWHVIGMGTTPEVHSIFLEGHTFLVRNHRQASLEISPITFLTAQTLLMDLGQFLLFCHISSHQHDGMEAYVKVDSCPEEPQLRMKNNEEAEDYDDDLTDSEMDVVRFDDDNSPSFIQIRSVAKKHPKTWVHYIAAEEEDWDYAPLVLAPDDRSYKSQYLNNGPQRIGRKYKKVRFMAYTDETFKTREAIQHESGILGPLLYGEVGDTLLIIFKNQASRPYNIYPHGITDVRPLYSRRLPKGVKHLKDFPILPGEIFKYKWTVTVEDGPTKSDPRCLTRYYSSFVNMERDLASGLIGPLLICYKESVDQRGNQIMSDKRNVILFSVFDENRSWYLTENIQRFLPNPAGVQLEDPEFQASNIMHSINGYVFDSLQLSVCLHEVAYWYILSIGAQTDFLSVFFSGYTFKHKMVYEDTLTLFPFSGETVFMSMENPGLWILGCHNSDFRNRGMTALLKVSSCDKNTGDYYEDSYEDISAYILSKNNAIEPRSFSQNPPVLKRHQREITRTTLQSDQEEIDYDDTISVEMKKEDFDIYDEDENQSPRSFQKKTRHYFIAAVERLWDYGMSSSPHVLRNRAQSGSVPQFKKVVFQEFTDGSFTQPLYRGELNEHLGLLGPYIRAEVEDNIMVTFRNQASRPYSFYSSLISYEEDQRQGAEPRKNFVKPNETKTYFWKVQHHMAPTKDEFDCKAWAYFSDVDLEKDVHSGLIGPLLVCHTNTLNPAHGRQVTVQEFALFFTIFDETKSWYFTENMERNCRAPCNIQMEDPTFKENYRFHAINGYIMDTLPGLVMAQDQRIRWYLLSMGSNENIHSIHFSGHVFTVRKKEEYKMALYNLYPGVFETVEMLPSKAGIWRVECLIGEHLHAGMSTLFLVYSNKCQTPLGMASGHIRDFQITASGQYGQWAPKLARLHYSGSINAWSTKEPFSWIKVDLLAPMIIHGIKTQGARQKFSSLYISQFIIMYSLDGKKWQTYRGNSTGTLMVFFGNVDSSGIKHNIFNPPIIARYIRLHPTHYSIRSTLRMELMGCDLNSCSMPLGMESKAISDAQITASSYFTNMFATWSPSKARLHLQGRSNAWRPQVNNPKEWLQVDFQKTMKVTGVTTQGVKSLLTSMYVKEFLISSSQDGHQWTLFFQNGKVKVFQGNQDSFTPVVNSLDPPLLTRYLRIHPQSWVHQIALRMEVLGCEAQDLY

SEQ ID NO: 2667 - DNA, 4371 bp, synthetic construct
  misc_feature 1..4371: note = Variant of human B-domain deleted Factor VIII
  source 1..4371: mol_type = other DNA
atgcagattgaactgtctacctgcttcttcctctgtttgctgaggttctgctttagcgccactagacggtactaccttggcgctgtggagctgtcctgggactatatgcagagtgatttgggagagcttcccgtcgacgcacgatttcctcctcgcgttccaaagtcatttcccttcaacacaagcgtggtgtacaagaagacgctcttcgtcgaattcaccgatcacctgttcaatatcgccaaacccagaccaccatggatgggtcttttggggcctaccatacaagcggaggtgtatgacacagttgttatcactctcaagaacatggcttctcatccggtaagtcttcacgcagtgggcgtgtcctactggaaagcttcagaaggagccgagtatgatgatcagacatcccagagggagaaagaagacgacaaggtatttccaggtgggtctcatacctatgtgtggcaagtgctcaaagagaatggccctatggcaagcgatccgctctgtttgacttacagctacctttcacacgttgacctcgtcaaggacctcaactccgggttgattggagccttgttggtatgcagggaaggatctcttgccaaagagaagacacagaccctccacaagtttatccttctctttgctgtgttcgatgagggcaaaagttggcatagcgaaacgaagaattccctcatgcaggatcgcgacgcagccagcgccagagcttggcccaagatgcacactgtgaacggatatgtcaataggtcacttcctggcttgattgggtgtcatcggaaaagtgtctactggcacgtgatcggaatggggacaacaccagaggtccactccatatttctcgaaggccataccttccttgttcgaaaccacagacaggcatccttggagatctctcccattacctttctcactgcccaaacgctccttatggacttgggtcagttccttctcttctgccatatcagctcacaccagcatgatggtatggaagcttatgtgaaagtcgacagttgtcctgaggagccacagttgcgcatgaagaataatgaagaagccgaggattacgacgacgatctcaccgattctgagatggacgtggtgaggtttgatgacgacaactctccctccttcattcaaatccggagcgtggcgaagaaacaccccaagacttgggtccactatatagcggcggaagaggaggattgggattacgctcctcttgtattggcaccagatgaccgctcatacaaaagccagtacctcaacaacggaccgcagagaattggccggaagtataagaaagtgcgatttatggcctatacagacgaaacctttaagacaagggaggccatccagcatgagagtgggattttgggacctcttctttacggcgaagttggtgataccctcctcatcatcttcaagaatcaagcttctcgcccctataacatttacccacacgggatcactgacgttaggcctttgtatagcagaagacttcccaaaggcgtgaagcatctcaaagacttccccattttgccaggcgagatctttaagtacaaatggaccgtcacagtggaagatggaccgactaaatcagaccctcgatgccttacgcggtactattcctccttcgtgaatatggagagagatttggcaagcggactcataggaccactcctcatctgttacaaggaatctgtagaccagaggggtaaccagattatgagtgataaacgcaatgtgatcctttttagcgtcttcgacgagaaccggtcctggtacttgaccgagaatatacaaaggttccttcccaaccccgcaggcgttcagttggaagaccctgagtttcaggccagcaatattatgcactcaatcaacggctatgtgtttgatagtctccagctttctgtttgcctccatgaagtagcctattggtacatcttgtcaattggtgctcaaacagacttcctctccgtcttcttctccggctacacctttaagcacaagatggtgtatgaggacactctcacactctttccattttctggagaaaccgtgttcatgagcatggagaatccaggcctttggatcttgggttgccacaacagtgattttcgcaatcggggaatgactgctctcctcaaagtcagcagctgtgatcagaacacaggcgactattacgaagattcttacgaggacataagtgcctacttgttgtccaagaataacgccattgagcccagatcattctcccagaatcctcccgtgcttaaaaggcatcagcgcgaaatcaccagaactactcttcagtctgatcaagaggagattgactatgacgacaccataagcgtggaaatgaagaaggaggatttcgatatctatgacgaagatgagaaccagtctccgcggagctttcagaagaagacgcgacactacttcattgcagcagtcgaaaggctttgggactacggtatgtcatcatcccctcatgtgttgcgcaatagagctcagagtggaagtgttccacagttcaagaaagtcgtctttcaagagtttacagatggcagcttcacacagcctctctatcggggcgagcttaacgaacatttgggactccttggtccctatatccgagccgaagtggaggacaacattatggttacctttaggaatcaagcctctcgcccctacagcttctactcctccctcatcagttatgaggaggatcagagacaaggcgctgaaccacggaagaactttgtgaaaccgaatgagacgaagacctacttctggaaagtacagcaccacatggcccccacaaaagacgaattcgattgcaaagcatgggcgtatttttcagacgttgacttggagaaagatgtacattcaggacttattggtcctttgttggtgtgtcacactaacactctcaatccagcccatggcaggcaggtgacagtccaggaattcgctcttttctttaccatctttgatgagaccaagtcctggtacttcacggaaaacatggagcgcaattgcagagccccctgtaacatacagatggaggaccctacctttaaggaaaattatcggttccacgcaatcaacggatacattatggatacactccctggccttgtgatggctcaggaccaacgaatcaggtggtacctcctcagcatgggttctaatgagaacatacactccattcacttttcaggacatgtgttcactgtccggaagaaagaagagtataagatggccctctacaatttgtatccaggcgtgtttgagaccgttgaaatgcttccctctaaagctggcatctggagagtagagtgcttgatcggagaacatcttcacgcaggtatgagcaccttgttcctcgtgtacagcaacaaatgtcagaccccacttggcatggccagtggacacattcgcgactttcagatcacagcatctggccagtatggacaatgggccccaaagttggctcgcctccattactccggtagcataaatgcgtggtccactaaagaacctttcagctggattaaggtcgatcttcttgcccccatgatcatccacggcattaagacacagggagcgaggcagaaattctcctccctctacatctcacagttcattattatgtatagtttggacggcaagaagtggcaaacttatagaggtaacagtactggaacactcatggtgttcttcggcaacgttgatagctctggcatcaaacacaacatctttaatcctcccataatagctcggtacatcagattgcatccgacccactacagcattaggagtacactccgaatggagcttatgggttgcgacttgaattcctgttcaatgccactcggaatggagtctaaagccatctctgatgcacagataaccgccagtagctactttacgaacatgtttgctacgtggtcaccctctaaggcaaggcttcatttgcaaggccggtctaatgcctggagacctcaggtgaacaacccgaaagaatggctccaggtggactttcagaagaccatgaaagtaacaggtgtcactactcagggagttaagtccttgctcaccagcatgtatgtgaaggagttccttatttcctcatcacaagatggccaccagtggaccctcttctttcagaatggtaaggtcaaagtgtttcagggcaatcaagacagcttcacacccgtggtgaacagtcttgatcctccactcttgacacgataccttcgaatccatccacagtcttgggttcaccagattgcattgcgcatggaagtacttggatgcgaggctcaggacctctac

SEQ ID NO: 2668 - protein, 1457 aa, synthetic construct
  REGION 1..1457: note = Variant of human B-domain deleted Factor VIII
MQIELSTCFFLCLLRFCFSATRRYYLGAVELSWDYMQSDLGELPVDARFPPRVPKSFPFNTSVVYKKTLFVEFTDHLFNIAKPRPPWMGLLGPTIQAEVYDTVVITLKNMASHPVSLHAVGVSYWKASEGAEYDDQTSQREKEDDKVFPGGSHTYVWQVLKENGPMASDPLCLTYSYLSHVDLVKDLNSGLIGALLVCREGSLAKEKTQTLHKFILLFAVFDEGKSWHSETKNSLMQDRDAASARAWPKMHTVNGYVNRSLPGLIGCHRKSVYWHVIGMGTTPEVHSIFLEGHTFLVRNHRQASLEISPITFLTAQTLLMDLGQFLLFCHISSHQHDGMEAYVKVDSCPEEPQLRMKNNEEAEDYDDDLTDSEMDVVRFDDDNSPSFIQIRSVAKKHPKTWVHYIAAEEEDWDYAPLVLAPDDRSYKSQYLNNGPQRIGRKYKKVRFMAYTDETFKTREAIQHESGILGPLLYGEVGDTLLIIFKNQASRPYNIYPHGITDVRPLYSRRLPKGVKHLKDFPILPGEIFKYKWTVTVEDGPTKSDPRCLTRYYSSFVNMERDLASGLIGPLLICYKESVDQRGNQIMSDKRNVILFSVFDENRSWYLTENIQRFLPNPAGVQLEDPEFQASNIMHSINGYVFDSLQLSVCLHEVAYWYILSIGAQTDFLSVFFSGYTFKHKMVYEDTLTLFPFSGETVFMSMENPGLWILGCHNSDFRNRGMTALLKVSSCDQNTGDYYEDSYEDISAYLLSKNNAIEPRSFSQNPPVLKRHQREITRTTLQSDQEEIDYDDTISVEMKKEDFDIYDEDENQSPRSFQKKTRHYFIAAVERLWDYGMSSSPHVLRNRAQSGSVPQFKKVVFQEFTDGSFTQPLYRGELNEHLGLLGPYIRAEVEDNIMVTFRNQASRPYSFYSSLISYEEDQRQGAEPRKNFVKPNETKTYFWKVQHHMAPTKDEFDCKAWAYFSDVDLEKDVHSGLIGPLLVCHTNTLNPAHGRQVTVQEFALFFTIFDETKSWYFTENMERNCRAPCNIQMEDPTFKENYRFHAINGYIMDTLPGLVMAQDQRIRWYLLSMGSNENIHSIHFSGHVFTVRKKEEYKMALYNLYPGVFETVEMLPSKAGIWRVECLIGEHLHAGMSTLFLVYSNKCQTPLGMASGHIRDFQITASGQYGQWAPKLARLHYSGSINAWSTKEPFSWIKVDLLAPMIIHGIKTQGARQKFSSLYISQFIIMYSLDGKKWQTYRGNSTGTLMVFFGNVDSSGIKHNIFNPPIIARYIRLHPTHYSIRSTLRMELMGCDLNSCSMPLGMESKAISDAQITASSYFTNMFATWSPSKARLHLQGRSNAWRPQVNNPKEWLQVDFQKTMKVTGVTTQGVKSLLTSMYVKEFLISSSQDGHQWTLFFQNGKVKVFQGNQDSFTPVVNSLDPPLLTRYLRIHPQSWVHQIALRMEVLGCEAQDLY

SEQ ID NO: 2669 - DNA, 4371 bp, synthetic construct
  misc_feature 1..4371: note = Variant of human B-domain deleted Factor VIII
  source 1..4371: mol_type = other DNA
atgcagattgaactgtctacctgcttcttcctctgtttgctgaggttctgctttagcgccactagacggtactaccttggcgctgtggagctgtcctgggactatatgcagagtgatttgggagagcttcccgtcgacgcacgatttcctcctcgcgttccaaagtcatttcccttcaacacaagcgtggtgtacaagaagacgctcttcgtcgaattcaccgatcacctgttcaatatcgccaaacccagaccaccatggatgggtcttttggggcctaccatacaagcggaggtgtatgacacagttgttatcactctcaagaacatggcttctcatccggtaagtcttcacgcagtgggcgtgtcctactggaaagcttcagaaggagccgagtatgatgatcagacatcccagagggagaaagaagacgacaaggtatttccaggtgggtctcatacctatgtgtggcaagtgctcaaagagaatggccctatggcaagcgatccgctctgtttgacttacagctacctttcacacgttgacctcgtcaaggacctcaactccgggttgattggagccttgttggtatgcagggaaggatctcttgccaaagagaagacacagaccctccacaagtttatccttctctttgctgtgttcgatgagggcaaaagttggcatagcgaaacgaagaattccctcatgcaggatcgcgacgcagccagcgccagagcttggcccaagatgcacactgtgaacggatatgtcaataggtcacttcctggcttgattgggtgtcatcggaaaagtgtctactggcacgtgatcggaatggggacaacaccagaggtccactccatatttctcgaaggccataccttccttgttcgaaaccacagacaggcatccttggagatctctcccattacctttctcactgcccaaacgctccttatggacttgggtcagttccttctcttctgccatatcagctcacaccagcatgatggtatggaagcttatgtgaaagtcgacagttgtcctgaggagccacagttgcgcatgaagaataatgaagaagccgaggattacgacgacgatctcaccgattctgagatggacgtggtgaggtttgatgacgacaactctccctccttcattcaaatccggagcgtggcgaagaaacaccccaagacttgggtccactatatagcggcggaagaggaggattgggattacgctcctcttgtattggcaccagatgaccgctcatacaaaagccagtacctcaacaacggaccgcagagaattggccggaagtataagaaagtgcgatttatggcctatacagacgaaacctttaagacaagggaggccatccagcatgagagtgggattttgggacctcttctttacggcgaagttggtgataccctcctcatcatcttcaagaatcaagcttctcgcccctataacatttacccacacgggatcactgacgttaggcctttgtatagcagaagacttcccaaaggcgtgaagcatctcaaagacttccccattttgccaggcgagatctttaagtacaaatggaccgtcacagtggaagatggaccgactaaatcagaccctcgatgccttacgcggtactattcctccttcgtgaatatggagagagatttggcaagcggactcataggaccactcctcatctgttacaaggaatctgtagaccagaggggtaaccagattatgagtgataaacgcaatgtgatcctttttagcgtcttcgacgagaaccggtcctggtacttgaccgagaatatacaaaggttccttcccaaccccgcaggcgttcagttggaagaccctgagtttcaggccagcaatattatgcactcaatcaacggctatgtgtttgatagtctccagctttctgtttgcctccatgaagtagcctattggtacatcttgtcaattggtgctcaaacagacttcctctccgtcttcttctccggctacacctttaagcacaagatggtgtatgaggacactctcacactctttccattttctggagaaaccgtgttcatgagcatggagaatccaggcctttggatcttgggttgccacaacagtgattttcgcaatcggggaatgactgctctcctcaaagtcagcagctgtgataagaacacaggcgactattacgaagattcttacgaggacataagtgcctacttgttgtccaagaataacgccattgagcccagatcattctcccagaatcctcccgtgcttaaaaggcatcagcgcgaaatcaccagaactactcttcagtctgatcaagaggagattgactatgacgacaccataagcgtggaaatgaagaaggaggatttcgatatcatggacgaagatgagaaccagtctccgcggagctttcagaagaagacgcgacactacttcattgcagcagtcgaaaggctttgggactacggtatgtcatcatcccctcatgtgttgcgcaatagagctcagagtggaagtgttccacagttcaagaaagtcgtctttcaagagtttacagatggcagcttcacacagcctctctatcggggcgagcttaacgaacatttgggactccttggtccctatatccgagccgaagtggaggacaacattatggttacctttaggaatcaagcctctcgcccctacagcttctactcctccctcatcagttatgaggaggatcagagacaaggcgctgaaccacggaagaactttgtgaaaccgaatgagacgaagacctacttctggaaagtacagcaccacatggcccccacaaaagacgaattcgattgcaaagcatgggcgtatttttcagacgttgacttggagaaagatgtacattcaggacttattggtcctttgttggtgtgtcacactaacactctcaatccagcccatggcaggcaggtgacagtccaggaattcgctcttttctttaccatctttgatgagaccaagtcctggtacttcacggaaaacatggagcgcaattgcagagccccctgtaacatacagatggaggaccctacctttaaggaaaattatcggttccacgcaatcaacggatacattatggatacactccctggccttgtgatggctcaggaccaacgaatcaggtggtacctcctcagcatgggttctaatgagaacatacactccattcacttttcaggacatgtgttcactgtccggaagaaagaagagtataagatggccctctacaatttgtatccaggcgtgtttgagaccgttgaaatgcttccctctaaagctggcatctggagagtagagtgcttgatcggagaacatcttcacgcaggtatgagcaccttgttcctcgtgtacagcaacaaatgtcagaccccacttggcatggccagtggacacattcgcgactttcagatcacagcatctggccagtatggacaatgggccccaaagttggctcgcctccattactccggtagcataaatgcgtggtccactaaagaacctttcagctggattaaggtcgatcttcttgcccccatgatcatccacggcattaagacacagggagcgaggcagaaattctcctccctctacatctcacagttcattattatgtatagtttggacggcaagaagtggcaaacttatagaggtaacagtactggaacactcatggtgttcttcggcaacgttgatagctctggcatcaaacacaacatctttaatcctcccataatagctcggtacatcagattgcatccgacccactacagcattaggagtacactccgaatggagcttatgggttgcgacttgaattcctgttcaatgccactcggaatggagtctaaagccatctctgatgcacagataaccgccagtagctactttacgaacatgtttgctacgtggtcaccctctaaggcaaggcttcatttgcaaggccggtctaatgcctggagacctcaggtgaacaacccgaaagaatggctccaggtggactttcagaagaccatgaaagtaacaggtgtcactactcagggagttaagtccttgctcaccagcatgtatgtgaaggagttccttatttcctcatcacaagatggccaccagtggaccctcttctttcagaatggtaaggtcaaagtgtttcagggcaatcaagacagcttcacacccgtggtgaacagtcttgatcctccactcttgacacgataccttcgaatccatccacagtcttgggttcaccagattgcattgcgcatggaagtacttggatgcgaggctcaggacctctac

SEQ ID NO: 2670 - protein, 1457 aa, synthetic construct
  REGION 1..1457: note = Variant of human B-domain deleted Factor VIII
MQIELSTCFFLCLLRFCFSATRRYYLGAVELSWDYMQSDLGELPVDARFPPRVPKSFPFNTSVVYKKTLFVEFTDHLFNIAKPRPPWMGLLGPTIQAEVYDTVVITLKNMASHPVSLHAVGVSYWKASEGAEYDDQTSQREKEDDKVFPGGSHTYVWQVLKENGPMASDPLCLTYSYLSHVDLVKDLNSGLIGALLVCREGSLAKEKTQTLHKFILLFAVFDEGKSWHSETKNSLMQDRDAASARAWPKMHTVNGYVNRSLPGLIGCHRKSVYWHVIGMGTTPEVHSIFLEGHTFLVRNHRQASLEISPITFLTAQTLLMDLGQFLLFCHISSHQHDGMEAYVKVDSCPEEPQLRMKNNEEAEDYDDDLTDSEMDVVRFDDDNSPSFIQIRSVAKKHPKTWVHYIAAEEEDWDYAPLVLAPDDRSYKSQYLNNGPQRIGRKYKKVRFMAYTDETFKTREAIQHESGILGPLLYGEVGDTLLIIFKNQASRPYNIYPHGITDVRPLYSRRLPKGVKHLKDFPILPGEIFKYKWTVTVEDGPTKSDPRCLTRYYSSFVNMERDLASGLIGPLLICYKESVDQRGNQIMSDKRNVILFSVFDENRSWYLTENIQRFLPNPAGVQLEDPEFQASNIMHSINGYVFDSLQLSVCLHEVAYWYILSIGAQTDFLSVFFSGYTFKHKMVYEDTLTLFPFSGETVFMSMENPGLWILGCHNSDFRNRGMTALLKVSSCDKNTGDYYEDSYEDISAYLLSKNNAIEPRSFSQNPPVLKRHQREITRTTLQSDQEEIDYDDTISVEMKKEDFDIMDEDENQSPRSFQKKTRHYFIAAVERLWDYGMSSSPHVLRNRAQSGSVPQFKKVVFQEFTDGSFTQPLYRGELNEHLGLLGPYIRAEVEDNIMVTFRNQASRPYSFYSSLISYEEDQRQGAEPRKNFVKPNETKTYFWKVQHHMAPTKDEFDCKAWAYFSDVDLEKDVHSGLIGPLLVCHTNTLNPAHGRQVTVQEFALFFTIFDETKSWYFTENMERNCRAPCNIQMEDPTFKENYRFHAINGYIMDTLPGLVMAQDQRIRWYLLSMGSNENIHSIHFSGHVFTVRKKEEYKMALYNLYPGVFETVEMLPSKAGIWRVECLIGEHLHAGMSTLFLVYSNKCQTPLGMASGHIRDFQITASGQYGQWAPKLARLHYSGSINAWSTKEPFSWIKVDLLAPMIIHGIKTQGARQKFSSLYISQFIIMYSLDGKKWQTYRGNSTGTLMVFFGNVDSSGIKHNIFNPPIIARYIRLHPTHYSIRSTLRMELMGCDLNSCSMPLGMESKAISDAQITASSYFTNMFATWSPSKARLHLQGRSNAWRPQVNNPKEWLQVDFQKTMKVTGVTTQGVKSLLTSMYVKEFLISSSQDGHQWTLFFQNGKVKVFQGNQDSFTPVVNSLDPPLLTRYLRIHPQSWVHQIALRMEVLGCEAQDLY

SEQ ID NO: 2671 - DNA, 4371 bp, synthetic construct
  misc_feature 1..4371: note = Variant of human B-domain deleted Factor VIII
  source 1..4371: mol_type = other DNA
atgcagattgaactgtctacctgcttcttcctctgtttgctgaggttctgctttagcgccactagacggtactaccttggcgctgtggagctgtcctgggactatatgcagagtgatttgggagagcttcccgtcgacgcacgatttcctcctcgcgttccaaagtcatttcccttcaacacaagcgtggtgtacaagaagacgctcttcgtcgaattcaccgatcacctgttcaatatcgccaaacccagaccaccatggatgggtcttttggggcctaccatacaagcggaggtgtatgacacagttgttatcactctcaagaacatggcttctcatccggtaagtcttcacgcagtgggcgtgtcctactggaaagcttcagaaggagccgagtatgatgatcagacatcccagagggagaaagaagacgacaaggtatttccaggtgggtctcatacctatgtgtggcaagtgctcaaagagaatggccctatggcaagcgatccgctctgtttgacttacagctacctttcacacgttgacctcgtcaaggacctcaactccgggttgattggagccttgttggtatgcagggaaggatctcttgccaaagagaagacacagaccctccacaagtttatccttctctttgctgtgttcgatgagggcaaaagttggcatagcgaaacgaagaattccctcatgcaggatcgcgacgcagccagcgccagagcttggcccaagatgcacactgtgaacggatatgtcaataggtcacttcctggcttgattgggtgtcatcggaaaagtgtctactggcacgtgatcggaatggggacaacaccagaggtccactccatatttctcgaaggccataccttccttgttcgaaaccacagacaggcatccttggagatctctcccattacctttctcactgcccaaacgctccttatggacttgggtcagttccttctcttctgccatatcagctcacaccagcatgatggtatggaagcttatgtgaaagtcgacagttgtcctgaggagccacagttgcgcatgaagaataatgaagaagccgaggattacgacgacgatctcaccgattctgagatggacgtggtgaggtttgatgacgacaactctccctccttcattcaaatccggagcgtggcgaagaaacaccccaagacttgggtccactatatagcggcggaagaggaggattgggattacgctcctcttgtattggcaccagatgaccgctcatacaaaagccagtacctcaacaacggaccgcagagaattggccggaagtataagaaagtgcgatttatggcctatacagacgaaacctttaagacaagggaggccatccagcatgagagtgggattttgggacctcttctttacggcgaagttggtgataccctcctcatcatcttcaagaatcaagcttctcgcccctataacatttacccacacgggatcactgacgttaggcctttgtatagcagaagacttcccaaaggcgtgaagcatctcaaagacttccccattttgccaggcgagatctttaagtacaaatggaccgtcacagtggaagatggaccgactaaatcagaccctcgatgccttacgcggtactattcctccttcgtgaatatggagagagatttggcaagcggactcataggaccactcctcatctgttacaaggaatctgtagaccagaggggtaaccagattatgagtgataaacgcaatgtgatcctttttagcgtcttcgacgagaaccggtcctggtacttgaccgagaatatacaaaggttccttcccaaccccgcaggcgttcagttggaagaccctgagtttcaggccagcaatattatgcactcaatcaacggctatgtgtttgatagtctccagctttctgtttgcctccatgaagtagcctattggtacatcttgtcaattggtgctcaaacagacttcctctccgtcttcttctccggctacacctttaagcacaagatggtgtatgaggacactctcacactctttccattttctggagaaaccgtgttcatgagcatggagaatccaggcctttggatcttgggttgccacaacagtgattttcgcaatcggggaatgactgctctcctcaaagtcagcagctgtgataagaacacaggcgactattacgaagattcttacgaggacataagtgcctacttgttgtccaagaataacgccattgagcccagatcattctcccagaatcctcccgtgcttaaaaggcatcagcgcgaaaagaccagaactactcttcagtctgatcaagaggagattgactatgacgacaccataagcgtggaaatgaagaaggaggatttcgatatctatgacgaagatgagaaccagtctccgcggagctttcagaagaagacgcgacactacttcattgcagcagtcgaaaggctttgggactacggtatgtcatcatcccctcatgtgttgcgcaatagagctcagagtggaagtgttccacagttcaagaaagtcgtctttcaagagtttacagatggcagcttcacacagcctctctatcggggcgagcttaacgaacatttgggactccttggtccctatatccgagccgaagtggaggacaacattatggttacctttaggaatcaagcctctcgcccctacagcttctactcctccctcatcagttatgaggaggatcagagacaaggcgctgaaccacggaagaactttgtgaaaccgaatgagacgaagacctacttctggaaagtacagcaccacatggcccccacaaaagacgaattcgattgcaaagcatgggcgtatttttcagacgttgacttggagaaagatgtacattcaggacttattggtcctttgttggtgtgtcacactaacactctcaatccagcccatggcaggcaggtgacagtccaggaattcgctcttttctttaccatctttgatgagaccaagtcctggtacttcacggaaaacatggagcgcaattgcagagccccctgtaacatacagatggaggaccctacctttaaggaaaattatcggttccacgcaatcaacggatacattatggatacactccctggccttgtgatggctcaggaccaacgaatcaggtggtacctcctcagcatgggttctaatgagaacatacactccattcacttttcaggacatgtgttcactgtccggaagaaagaagagtataagatggccctctacaatttgtatccaggcgtgtttgagaccgttgaaatgcttccctctaaagctggcatctggagagtagagtgcttgatcggagaacatcttcacgcaggtatgagcaccttgttcctcgtgtacagcaacaaatgtcagaccccacttggcatggccagtggacacattcgcgactttcagatcacagcatctggccagtatggacaatgggccccaaagttggctcgcctccattactccggtagcataaatgcgtggtccactaaagaacctttcagctggattaaggtcgatcttcttgcccccatgatcatccacggcattaagacacagggagcgaggcagaaattctcctccctctacatctcacagttcattattatgtatagtttggacggcaagaagtggcaaacttatagaggtaacagtactggaacactcatggtgttcttcggcaacgttgatagctctggcatcaaacacaacatctttaatcctcccataatagctcggtacatcagattgcatccgacccactacagcattaggagtacactccgaatggagcttatgggttgcgacttgaattcctgttcaatgccactcggaatggagtctaaagccatctctgatgcacagataaccgccagtagctactttacgaacatgtttgctacgtggtcaccctctaaggcaaggcttcatttgcaaggccggtctaatgcctggagacctcaggtgaacaacccgaaagaatggctccaggtggactttcagaagaccatgaaagtaacaggtgtcactactcagggagttaagtccttgctcaccagcatgtatgtgaaggagttccttatttcctcatcacaagatggccaccagtggaccctcttctttcagaatggtaaggtcaaagtgtttcagggcaatcaagacagcttcacacccgtggtgaacagtcttgatcctccactcttgacacgataccttcgaatccatccacagtcttgggttcaccagattgcattgcgcatggaagtacttggatgcgaggctcaggacctctac

SEQ ID NO: 2672 - protein, 1457 aa, synthetic construct
  REGION 1..1457: note = Variant of human B-domain deleted Factor VIII
MQIELSTCFFLCLLRFCFSATRRYYLGAVELSWDYMQSDLGELPVDARFPPRVPKSFPFNTSVVYKKTLFVEFTDHLFNIAKPRPPWMGLLGPTIQAEVYDTVVITLKNMASHPVSLHAVGVSYWKASEGAEYDDQTSQREKEDDKVFPGGSHTYVWQVLKENGPMASDPLCLTYSYLSHVDLVKDLNSGLIGALLVCREGSLAKEKTQTLHKFILLFAVFDEGKSWHSETKNSLMQDRDAASARAWPKMHTVNGYVNRSLPGLIGCHRKSVYWHVIGMGTTPEVHSIFLEGHTFLVRNHRQASLEISPITFLTAQTLLMDLGQFLLFCHISSHQHDGMEAYVKVDSCPEEPQLRMKNNEEAEDYDDDLTDSEMDVVRFDDDNSPSFIQIRSVAKKHPKTWVHYIAAEEEDWDYAPLVLAPDDRSYKSQYLNNGPQRIGRKYKKVRFMAYTDETFKTREAIQHESGILGPLLYGEVGDTLLIIFKNQASRPYNIYPHGITDVRPLYSRRLPKGVKHLKDFPILPGEIFKYKWTVTVEDGPTKSDPRCLTRYYSSFVNMERDLASGLIGPLLICYKESVDQRGNQIMSDKRNVILFSVFDENRSWYLTENIQRFLPNPAGVQLEDPEFQASNIMHSINGYVFDSLQLSVCLHEVAYWYILSIGAQTDFLSVFFSGYTFKHKMVYEDTLTLFPFSGETVFMSMENPGLWILGCHNSDFRNRGMTALLKVSSCDKNTGDYYEDSYEDISAYLLSKNNAIEPRSFSQNPPVLKRHQREKTRTTLQSDQEEIDYDDTISVEMKKEDFDIYDEDENQSPRSFQKKTRHYFIAAVERLWDYGMSSSPHVLRNRAQSGSVPQFKKVVFQEFTDGSFTQPLYRGELNEHLGLLGPYIRAEVEDNIMVTFRNQASRPYSFYSSLISYEEDQRQGAEPRKNFVKPNETKTYFWKVQHHMAPTKDEFDCKAWAYFSDVDLEKDVHSGLIGPLLVCHTNTLNPAHGRQVTVQEFALFFTIFDETKSWYFTENMERNCRAPCNIQMEDPTFKENYRFHAINGYIMDTLPGLVMAQDQRIRWYLLSMGSNENIHSIHFSGHVFTVRKKEEYKMALYNLYPGVFETVEMLPSKAGIWRVECLIGEHLHAGMSTLFLVYSNKCQTPLGMASGHIRDFQITASGQYGQWAPKLARLHYSGSINAWSTKEPFSWIKVDLLAPMIIHGIKTQGARQKFSSLYISQFIIMYSLDGKKWQTYRGNSTGTLMVFFGNVDSSGIKHNIFNPPIIARYIRLHPTHYSIRSTLRMELMGCDLNSCSMPLGMESKAISDAQITASSYFTNMFATWSPSKARLHLQGRSNAWRPQVNNPKEWLQVDFQKTMKVTGVTTQGVKSLLTSMYVKEFLISSSQDGHQWTLFFQNGKVKVFQGNQDSFTPVVNSLDPPLLTRYLRIHPQSWVHQIALRMEVLGCEAQDLY

SEQ ID NO: 2673 - DNA, 4371 bp, synthetic construct
  misc_feature 1..4371: note = Variant of human B-domain deleted Factor VIII
  source 1..4371: mol_type = other DNA
atgcagattgaactgtctacctgcttcttcctctgtttgctgaggttctgctttagcgccactagacggtactaccttggcgctgtggagctgtcctgggactatatgcagagtgatttgggagagcttcccgtcgacgcacgatttcctcctcgcgttccaaagtcatttcccttcaacacaagcgtggtgtacaagaagacgctcttcgtcgaattcaccgatcacctgttcaatatcgccaaacccagaccaccatggatgggtcttttggggcctaccatacaagcggaggtgtatgacacagttgttatcactctcaagaacatggcttctcatccggtaagtcttcacgcagtgggcgtgtcctactggaaagcttcagaaggagccgagtatgatgatcagacatcccagagggagaaagaagacgacaaggtatttccaggtgggtctcatacctatgtgtggcaagtgctcaaagagaatggccctatggcaagcgatccgctctgtttgacttacagctacctttcacacgttgacctcgtcaaggacctcaactccgggttgattggagccttgttggtatgcagggaaggatctcttgccaaagagaagacacagaccctccacaagtttatccttctctttgctgtgttcgatgagggcaaaagttggcatagcgaaacgaagaattccctcatgcaggatcgcgacgcagccagcgccagagcttggcccaagatgcacactgtgaacggatatgtcaataggtcacttcctggcttgattgggtgtcatcggaaaagtgtctactggcacgtgatcggaatggggacaacaccagaggtccactccatatttctcgaaggccataccttccttgttcgaaaccacagacaggcatccttggagatctctcccattacctttctcactgcccaaacgctccttatggacttgggtcagttccttctcttctgccatatcagctcacaccagcatgatggtatggaagcttatgtgaaagtcgacagttgtcctgaggagccacagttgcgcatgaagaataatgaagaagccgaggattacgacgacgatctcaccgattctgagatggacgtggtgaggtttgatgacgacaactctccctccactattcaaatccggagcgtggcgaagaaacaccccaagacttgggtccactatatagcggcggaagaggaggattgggattacgctcctcttgtattggcaccagatgaccgctcatacaaaagccagtacctcaacaacggaccgcagagaattggccggaagtataagaaagtgcgatttatggcctatacagacgaaacctttaagacaagggaggccatccagcatgagagtgggattttgggacctcttctttacggcgaagttggtgataccctcctcatcatcttcaagaatcaagcttctcgcccctataacatttacccacacgggatcactgacgttaggcctttgtatagcagaagacttcccaaaggcgtgaagcatctcaaagacttccccattttgccaggcgagatctttaagtacaaatggaccgtcacagtggaagatggaccgactaaatcagaccctcgatgccttacgcggtactattcctccttcgtgaatatggagagagatttggcaagcggactcataggaccactcctcatctgttacaaggaatctgtagaccagaggggtaaccagattatgagtgataaacgcaatgtgatcctttttagcgtcttcgacgagaaccggtcctggtacttgaccgagaatatacaaaggttccttcccaaccccgcaggcgttcagttggaagaccctgagtttcaggccagcaatattatgcactcaatcaacggctatgtgtttgatagtctccagctttctgtttgcctccatgaagtagcctattggtacatcttgtcaattggtgctcaaacagacttcctctccgtcttcttctccggctacacctttaagcacaagatggtgtatgaggacactctcacactctttccattttctggagaaaccgtgttcatgagcatggagaatccaggcctttggatcttgggttgccacaacagtgattttcgcaatcggggaatgactgctctcctcaaagtcagcagctgtgataagaacacaggcgactattacgaagattcttacgaggacataagtgcctacttgttgtccaagaataacgccattgagcccagatcattctcccagaatcctcccgtgcttaaaaggcatcagcgcgaaatcaccagaactactcttcagtctgatcaagaggagattgactatgacgacaccataagcgtggaaatgaagaaggaggatttcgatatctatgacgaagatgagaaccagtctccgcggagctttcagaagaagacgcgacactacttcattgcagcagtcgaaaggctttgggactacggtatgtcatcatcccctcatgtgttgcgcaatagagctcagagtggaagtgttccacagttcaagaaagtcgtctttcaagagtttacagatggcagcttcacacagcctctctatcggggcgagcttaacgaacatttgggactccttggtccctatatccgagccgaagtggaggacaacattatggttacctttaggaatcaagcctctcgcccctacagcttctactcctccctcatcagttatgaggaggatcagagacaaggcgctgaaccacggaagaactttgtgaaaccgaatgagacgaagacctacttctggaaagtacagcaccacatggcccccacaaaagacgaattcgattgcaaagcatgggcgtatttttcagacgttgacttggagaaagatgtacattcaggacttattggtcctttgttggtgtgtcacactaacactctcaatccagcccatggcaggcaggtgacagtccaggaattcgctcttttctttaccatctttgatgagaccaagtcctggtacttcacggaaaacatggagcgcaattgcagagccccctgtaacatacagatggaggaccctacctttaaggaaaattatcggttccacgcaatcaacggatacattatggatacactccctggccttgtgatggctcaggaccaacgaatcaggtggtacctcctcagcatgggttctaatgagaacatacactccattcacttttcaggacatgtgttcactgtccggaagaaagaagagtataagatggccctctacaatttgtatccaggcgtgtttgagaccgttgaaatgcttccctctaaagctggcatctggagagtagagtgcttgatcggagaacatcttcacgcaggtatgagcaccttgttcctcgtgtacagcaacaaatgtcagaccccacttggcatggccagtggacacattcgcgactttcagatcacagcatctggccagtatggacaatgggccccaaagttggctcgcctccattactccggtagcataaatgcgtggtccactaaagaacctttcagctggattaaggtcgatcttcttgcccccatgatcatccacggcattaagacacagggagcgaggcagaaattctcctccctctacatctcacagttcattattatgtatagtttggacggcaagaagtggcaaacttatagaggtaacagtactggaacactcatggtgttcttcggcaacgttgatagctctggcatcaaacacaacatctttaatcctcccataatagctcggtacatcagattgcatccgacccactacagcattaggagtacactccgaatggagcttatgggttgcgacttgaattcctgttcaatgccactcggaatggagtctaaagccatctctgatgcacagataaccgccagtagctactttacgaacatgtttgctacgtggtcaccctctaaggcaaggcttcatttgcaaggccggtctaatgcctggagacctcaggtgaacaacccgaaagaatggctccaggtggactttcagaagaccatgaaagtaacaggtgtcactactcagggagttaagtccttgctcaccagcatgtatgtgaaggagttccttatttcctcatcacaagatggccaccagtggaccctcttctttcagaatggtaaggtcaaagtgtttcagggcaatcaagacagcttcacacccgtggtgaacagtcttgatcctccactcttgacacgataccttcgaatccatccacagtcttgggttcaccagattgcattgcgcatggaagtacttggatgcgaggctcaggacctctac

SEQ ID NO: 2674 - protein, 1457 aa, synthetic construct
  REGION 1..1457: note = Variant of human B-domain deleted Factor VIII
MQIELSTCFFLCLLRFCFSATRRYYLGAVELSWDYMQSDLGELPVDARFPPRVPKSFPFNTSVVYKKTLFVEFTDHLFNIAKPRPPWMGLLGPTIQAEVYDTVVITLKNMASHPVSLHAVGVSYWKASEGAEYDDQTSQREKEDDKVFPGGSHTYVWQVLKENGPMASDPLCLTYSYLSHVDLVKDLNSGLIGALLVCREGSLAKEKTQTLHKFILLFAVFDEGKSWHSETKNSLMQDRDAASARAWPKMHTVNGYVNRSLPGLIGCHRKSVYWHVIGMGTTPEVHSIFLEGHTFLVRNHRQASLEISPITFLTAQTLLMDLGQFLLFCHISSHQHDGMEAYVKVDSCPEEPQLRMKNNEEAEDYDDDLTDSEMDVVRFDDDNSPSTIQIRSVAKKHPKTWVHYIAAEEEDWDYAPLVLAPDDRSYKSQYLNNGPQRIGRKYKKVRFMAYTDETFKTREAIQHESGILGPLLYGEVGDTLLIIFKNQASRPYNIYPHGITDVRPLYSRRLPKGVKHLKDFPILPGEIFKYKWTVTVEDGPTKSDPRCLTRYYSSFVNMERDLASGLIGPLLICYKESVDQRGNQIMSDKRNVILFSVFDENRSWYLTENIQRFLPNPAGVQLEDPEFQASNIMHSINGYVFDSLQLSVCLHEVAYWYILSIGAQTDFLSVFFSGYTFKHKMVYEDTLTLFPFSGETVFMSMENPGLWILGCHNSDFRNRGMTALLKVSSCDKNTGDYYEDSYEDISAYLLSKNNAIEPRSFSQNPPVLKRHQREITRTTLQSDQEEIDYDDTISVEMKKEDFDIYDEDENQSPRSFQKKTRHYFIAAVERLWDYGMSSSPHVLRNRAQSGSVPQFKKVVFQEFTDGSFTQPLYRGELNEHLGLLGPYIRAEVEDNIMVTFRNQASRPYSFYSSLISYEEDQRQGAEPRKNFVKPNETKTYFWKVQHHMAPTKDEFDCKAWAYFSDVDLEKDVHSGLIGPLLVCHTNTLNPAHGRQVTVQEFALFFTIFDETKSWYFTENMERNCRAPCNIQMEDPTFKENYRFHAINGYIMDTLPGLVMAQDQRIRWYLLSMGSNENIHSIHFSGHVFTVRKKEEYKMALYNLYPGVFETVEMLPSKAGIWRVECLIGEHLHAGMSTLFLVYSNKCQTPLGMASGHIRDFQITASGQYGQWAPKLARLHYSGSINAWSTKEPFSWIKVDLLAPMIIHGIKTQGARQKFSSLYISQFIIMYSLDGKKWQTYRGNSTGTLMVFFGNVDSSGIKHNIFNPPIIARYIRLHPTHYSIRSTLRMELMGCDLNSCSMPLGMESKAISDAQITASSYFTNMFATWSPSKARLHLQGRSNAWRPQVNNPKEWLQVDFQKTMKVTGVTTQGVKSLLTSMYVKEFLISSSQDGHQWTLFFQNGKVKVFQGNQDSFTPVVNSLDPPLLTRYLRIHPQSWVHQIALRMEVLGCEAQDLY

SEQ ID NO: 2675 - DNA, 4371 bp, synthetic construct
  misc_feature 1..4371: note = Variant of human B-domain deleted Factor VIII
  source 1..4371: mol_type = other DNA
atgcagattgaactgtctacctgcttcttcctctgtttgctgaggttctgctttagcgccactagacggtactaccttggcgctgtggagctgtcctgggactatatgcagagtgatttgggagagcttcccgtcgacgcacgatttcctcctcgcgttccaaagtcatttcccttcaacacaagcgtggtgtacaagaagacgctcttcgtcgaattcaccgatcacctgttcaatatcgccaaacccagaccaccatggatgggtcttttggggcctaccatacaagcggaggtgtatgacacagttgttatcactctcaagaacatggcttctcatccggtaagtcttcacgcagtgggcgtgtcctactggaaagcttcagaaggagccgagtatgatgatcagacatcccagagggagaaagaagacgacaaggtatttccaggtgggtctcatacctatgtgtggcaagtgctcaaagagaatggccctatggcaagcgatccgctctgtttgacttacagctacctttcacacgttgacctcgtcaaggacctcaactccgggttgattggagccttgttggtatgcagggaaggatctcttgccaaagagaagacacagaccctccacaagtttatccttctctttgctgtgttcgatgagggcaaaagttggcatagcgaaacgaagaattccctcatgcaggatcgcgacgcagccagcgccagagcttggcccaagatgcacactgtgaacggatatgtcaataggtcacttcctggcttgattgggtgtcatcggaaaagtgtctactggcacgtgatcggaatggggacaacaccagaggtccactccatatttctcgaaggccataccttccttgttcgaaaccacagacaggcatccttggagatctctcccattacctttctcactgcccaaacgctccttatggacttgggtcagttccttctcttctgccatatcagctcacaccagcatgatggtatggaagcttatgtgaaagtcgacagttgtcctgaggagccacagttgcgcatgaagaataatgaagaagccgaggattacgacgacgatctcaccgattctgagatggacgtggtgaggtttgatgacgacaactctccctccttcattcaaatccggagcgtggcgaagaaacaccccaagacttgggtccactatatagcggcggaagaggaggattgggattacgctcctcttgtattggcaccagatgaccgctcatacaaaagccagtacctcaacaacggaccgcagagaattggccggaagtataagaaagtgcgatttatggcctatacagacgaaacctttaagacaagggaggccatccagcatgagagtgggattttgggacctcttctttacggcgaagttggtgataccctcctcatcatcttcaagaatcaagcttctcgcccctataacatttacccacacgggatcactgacgttaggcctttgtatagcagaagacttcccaaaggcgtgaagcatctcaaagacttccccattttgccaggcgagatctttaagtacaaatggaccgtcacagtggaagatggaccgactaaatcagaccctcgatgccttacgcggtactattcctccttcgtgaatatggagagagatttggcaagcggactcataggaccactcctcatctgttacaaggaatctgtagaccagaggggtaaccagattatgagtgataaacgcaatgtgatcctttttagcgtcttcgacgagaaccggtcctggtacttgaccgagaatatacaaaggttccttcccaaccccgcaggcgttcagttggaagaccctgagtttcaggccagcaatattatgcactcaatcaacggctatgtgtttgatagtctccagctttctgtttgcctccatgaagtagcctattggtacatcttgtcaattggtgctcaaacagacttcctctccgtcttcttctccggctacacctttaagcacaagatggtgtatgaggacactctcacactctttccattttctggagaaaccgtgttcatgagcatggagaatccaggcctttggatcttgggttgccacaacagtgattttcgcaatcggggaatgactgctctcctcaaagtcagcagctgtgataagaacacaggcgactattacgaagattcttacgaggacataagtgcctacttgcagtccaagaataacgccattgagcccagatcattctcccagaatcctcccgtgcttaaaaggcatcagcgcgaaatcaccagaactactcttcagtctgatcaagaggagattgactatgacgacaccataagcgtggaaatgaagaaggaggatttcgatatctatgacgaagatgagaaccagtctccgcggagctttcagaagaagacgcgacactacttcattgcagcagtcgaaaggctttgggactacggtatgtcatcatcccctcatgtgttgcgcaatagagctcagagtggaagtgttccacagttcaagaaagtcgtctttcaagagtttacagatggcagcttcacacagcctctctatcggggcgagcttaacgaacatttgggactccttggtccctatatccgagccgaagtggaggacaacattatggttacctttaggaatcaagcctctcgcccctacagcttctactcctccctcatcagttatgaggaggatcagagacaaggcgctgaaccacggaagaactttgtgaaaccgaatgagacgaagacctacttctggaaagtacagcaccacatggcccccacaaaagacgaattcgattgcaaagcatgggcgtatttttcagacgttgacttggagaaagatgtacattcaggacttattggtcctttgttggtgtgtcacactaacactctcaatccagcccatggcaggcaggtgacagtccaggaattcgctcttttctttaccatctttgatgagaccaagtcctggtacttcacggaaaacatggagcgcaattgcagagccccctgtaacatacagatggaggaccctacctttaaggaaaattatcggttccacgcaatcaacggatacattatggatacactccctggccttgtgatggctcaggaccaacgaatcaggtggtacctcctcagcatgggttctaatgagaacatacactccattcacttttcaggacatgtgttcactgtccggaagaaagaagagtataagatggccctctacaatttgtatccaggcgtgtttgagaccgttgaaatgcttccctctaaagctggcatctggagagtagagtgcttgatcggagaacatcttcacgcaggtatgagcaccttgttcctcgtgtacagcaacaaatgtcagaccccacttggcatggccagtggacacattcgcgactttcagatcacagcatctggccagtatggacaatgggccccaaagttggctcgcctccattactccggtagcataaatgcgtggtccactaaagaacctttcagctggattaaggtcgatcttcttgcccccatgatcatccacggcattaagacacagggagcgaggcagaaattctcctccctctacatctcacagttcattattatgtatagtttggacggcaagaagtggcaaacttatagaggtaacagtactggaacactcatggtgttcttcggcaacgttgatagctctggcatcaaacacaacatctttaatcctcccataatagctcggtacatcagattgcatccgacccactacagcattaggagtacactccgaatggagcttatgggttgcgacttgaattcctgttcaatgccactcggaatggagtctaaagccatctctgatgcacagataaccgccagtagctactttacgaacatgtttgctacgtggtcaccctctaaggcaaggcttcatttgcaaggccggtctaatgcctggagacctcaggtgaacaacccgaaagaatggctccaggtggactttcagaagaccatgaaagtaacaggtgtcactactcagggagttaagtccttgctcaccagcatgtatgtgaaggagttccttatttcctcatcacaagatggccaccagtggaccctcttctttcagaatggtaaggtcaaagtgtttcagggcaatcaagacagcttcacacccgtggtgaacagtcttgatcctccactcttgacacgataccttcgaatccatccacagtcttgggttcaccagattgcattgcgcatggaagtacttggatgcgaggctcaggacctctac

SEQ ID NO: 2676 - protein, 1457 aa, synthetic construct
  REGION 1..1457: note = Variant of human B-domain deleted Factor VIII
MQIELSTCFFLCLLRFCFSATRRYYLGAVELSWDYMQSDLGELPVDARFPPRVPKSFPFNTSVVYKKTLFVEFTDHLFNIAKPRPPWMGLLGPTIQAEVYDTVVITLKNMASHPVSLHAVGVSYWKASEGAEYDDQTSQREKEDDKVFPGGSHTYVWQVLKENGPMASDPLCLTYSYLSHVDLVKDLNSGLIGALLVCREGSLAKEKTQTLHKFILLFAVFDEGKSWHSETKNSLMQDRDAASARAWPKMHTVNGYVNRSLPGLIGCHRKSVYWHVIGMGTTPEVHSIFLEGHTFLVRNHRQASLEISPITFLTAQTLLMDLGQFLLFCHISSHQHDGMEAYVKVDSCPEEPQLRMKNNEEAEDYDDDLTDSEMDVVRFDDDNSPSFIQIRSVAKKHPKTWVHYIAAEEEDWDYAPLVLAPDDRSYKSQYLNNGPQRIGRKYKKVRFMAYTDETFKTREAIQHESGILGPLLYGEVGDTLLIIFKNQASRPYNIYPHGITDVRPLYSRRLPKGVKHLKDFPILPGEIFKYKWTVTVEDGPTKSDPRCLTRYYSSFVNMERDLASGLIGPLLICYKESVDQRGNQIMSDKRNVILFSVFDENRSWYLTENIQRFLPNPAGVQLEDPEFQASNIMHSINGYVFDSLQLSVCLHEVAYWYILSIGAQTDFLSVFFSGYTFKHKMVYEDTLTLFPFSGETVFMSMENPGLWILGCHNSDFRNRGMTALLKVSSCDKNTGDYYEDSYEDISAYLQSKNNAIEPRSFSQNPPVLKRHQREITRTTLQSDQEEIDYDDTISVEMKKEDFDIYDEDENQSPRSFQKKTRHYFIAAVERLWDYGMSSSPHVLRNRAQSGSVPQFKKVVFQEFTDGSFTQPLYRGELNEHLGLLGPYIRAEVEDNIMVTFRNQASRPYSFYSSLISYEEDQRQGAEPRKNFVKPNETKTYFWKVQHHMAPTKDEFDCKAWAYFSDVDLEKDVHSGLIGPLLVCHTNTLNPAHGRQVTVQEFALFFTIFDETKSWYFTENMERNCRAPCNIQMEDPTFKENYRFHAINGYIMDTLPGLVMAQDQRIRWYLLSMGSNENIHSIHFSGHVFTVRKKEEYKMALYNLYPGVFETVEMLPSKAGIWRVECLIGEHLHAGMSTLFLVYSNKCQTPLGMASGHIRDFQITASGQYGQWAPKLARLHYSGSINAWSTKEPFSWIKVDLLAPMIIHGIKTQGARQKFSSLYISQFIIMYSLDGKKWQTYRGNSTGTLMVFFGNVDSSGIKHNIFNPPIIARYIRLHPTHYSIRSTLRMELMGCDLNSCSMPLGMESKAISDAQITASSYFTNMFATWSPSKARLHLQGRSNAWRPQVNNPKEWLQVDFQKTMKVTGVTTQGVKSLLTSMYVKEFLISSSQDGHQWTLFFQNGKVKVFQGNQDSFTPVVNSLDPPLLTRYLRIHPQSWVHQIALRMEVLGCEAQDLY

SEQ ID NO: 2677 - DNA, 4371 bp, synthetic construct
  misc_feature 1..4371: note = Variant of human B-domain deleted Factor VIII
  source 1..4371: mol_type = other DNA
atgcagattgaactgtctacctgcttcttcctctgtttgctgaggttctgctttagcgccactagacggtactaccttggcgctgtggagctgtcctgggactatatgcagagtgatttgggagagcttcccgtcgacgcacgatttcctcctcgcgttccaaagtcatttcccttcaacacaagcgtggtgtacaagaagacgctcttcgtcgaattcaccgatcacctgttcaatatcgccaaacccagaccaccatggatgggtcttttggggcctaccatacaagcggaggtgtatgacacagttgttatcactctcaagaacatggcttctcatccggtaagtcttcacgcagtgggcgtgtcctactggaaagcttcagaaggagccgagtatgatgatcagacatcccagagggagaaagaagacgacaaggtatttccaggtgggtctcatacctatgtgtggcaagtgctcaaagagaatggccctatggcaagcgatccgctctgtttgacttacagctacctttcacacgttgacctcgtcaaggacctcaactccgggttgattggagccttgttggtatgcagggaaggatctcttgccaaagagaagacacagaccctccacaagtttatccttctctttgctgtgttcgatgagggcaaaagttggcatagcgaaacgaagaattccctcatgcaggatcgcgacgcagccagcgccagagcttggcccaagatgcacactgtgaacggatatgtcaataggtcacttcctggcttgattgggtgtcatcggaaaagtgtctactggcacgtgatcggaatggggacaacaccagaggtccactccatatttctcgaaggccataccttccttgttcgaaaccacagacaggcatccttggagatctctcccattacctttctcactgcccaaacgctccttatggacttgggtcagttccttctcttctgccatatcagctcacaccagcatgatggtatggaagcttatgtgaaagtcgacagttgtcctgaggagccacagttgcgcatgaagaataatgaagaagccgaggattacgacgacgatctcaccgattctgagatggacgtggtgaggtttgatgacgacaactctccctccttcattcaactgcggagcgtggcgaagaaacaccccaagacttgggtccactatatagcggcggaagaggaggattgggattacgctcctcttgtattggcaccagatgaccgctcatacaaaagccagtacctcaacaacggaccgcagagaattggccggaagtataagaaagtgcgatttatggcctatacagacgaaacctttaagacaagggaggccatccagcatgagagtgggattttgggacctcttctttacggcgaagttggtgataccctcctcatcatcttcaagaatcaagcttctcgcccctataacatttacccacacgggatcactgacgttaggcctttgtatagcagaagacttcccaaaggcgtgaagcatctcaaagacttccccattttgccaggcgagatctttaagtacaaatggaccgtcacagtggaagatggaccgactaaatcagaccctcgatgccttacgcggtactattcctccttcgtgaatatggagagagatttggcaagcggactcataggaccactcctcatctgttacaaggaatctgtagaccagaggggtaaccagattatgagtgataaacgcaatgtgatcctttttagcgtcttcgacgagaaccggtcctggtacttgaccgagaatatacaaaggttccttcccaaccccgcaggcgttcagttggaagaccctgagtttcaggccagcaatattatgcactcaatcaacggctatgtgtttgatagtctccagctttctgtttgcctccatgaagtagcctattggtacatcttgtcaattggtgctcaaacagacttcctctccgtcttcttctccggctacacctttaagcacaagatggtgtatgaggacactctcacactctttccattttctggagaaaccgtgttcatgagcatggagaatccaggcctttggatcttgggttgccacaacagtgattttcgcaatcggggaatgactgctctcctcaaagtcagcagctgtgataagaacacaggcgactattacgaagattcttacgaggacataagtgcctacttgttgtccaagaataacgccattgagcccagatcattctcccagaatcctcccgtgcttaaaaggcatcagcgcgaaatcaccagaactactcttcagtctgatcaagaggagattgactatgacgacaccataagcgtggaaatgaagaaggaggatttcgatatctatgacgaagatgagaaccagtctccgcggagctttcagaagaagacgcgacactacttcattgcagcagtcgaaaggctttgggactacggtatgtcatcatcccctcatgtgttgcgcaatagagctcagagtggaagtgttccacagttcaagaaagtcgtctttcaagagtttacagatggcagcttcacacagcctctctatcggggcgagcttaacgaacatttgggactccttggtccctatatccgagccgaagtggaggacaacattatggttacctttaggaatcaagcctctcgcccctacagcttctactcctccctcatcagttatgaggaggatcagagacaaggcgctgaaccacggaagaactttgtgaaaccgaatgagacgaagacctacttctggaaagtacagcaccacatggcccccacaaaagacgaattcgattgcaaagcatgggcgtatttttcagacgttgacttggagaaagatgtacattcaggacttattggtcctttgttggtgtgtcacactaacactctcaatccagcccatggcaggcaggtgacagtccaggaattcgctcttttctttaccatctttgatgagaccaagtcctggtacttcacggaaaacatggagcgcaattgcagagccccctgtaacatacagatggaggaccctacctttaaggaaaattatcggttccacgcaatcaacggatacattatggatacactccctggccttgtgatggctcaggaccaacgaatcaggtggtacctcctcagcatgggttctaatgagaacatacactccattcacttttcaggacatgtgttcactgtccggaagaaagaagagtataagatggccctctacaatttgtatccaggcgtgtttgagaccgttgaaatgcttccctctaaagctggcatctggagagtagagtgcttgatcggagaacatcttcacgcaggtatgagcaccttgttcctcgtgtacagcaacaaatgtcagaccccacttggcatggccagtggacacattcgcgactttcagatcacagcatctggccagtatggacaatgggccccaaagttggctcgcctccattactccggtagcataaatgcgtggtccactaaagaacctttcagctggattaaggtcgatcttcttgcccccatgatcatccacggcattaagacacagggagcgaggcagaaattctcctccctctacatctcacagttcattattatgtatagtttggacggcaagaagtggcaaacttatagaggtaacagtactggaacactcatggtgttcttcggcaacgttgatagctctggcatcaaacacaacatctttaatcctcccataatagctcggtacatcagattgcatccgacccactacagcattaggagtacactccgaatggagcttatgggttgcgacttgaattcctgttcaatgccactcggaatggagtctaaagccatctctgatgcacagataaccgccagtagctactttacgaacatgtttgctacgtggtcaccctctaaggcaaggcttcatttgcaaggccggtctaatgcctggagacctcaggtgaacaacccgaaagaatggctccaggtggactttcagaagaccatgaaagtaacaggtgtcactactcagggagttaagtccttgctcaccagcatgtatgtgaaggagttccttatttcctcatcacaagatggccaccagtggaccctcttctttcagaatggtaaggtcaaagtgtttcagggcaatcaagacagcttcacacccgtggtgaacagtcttgatcctccactcttgacacgataccttcgaatccatccacagtcttgggttcaccagattgcattgcgcatggaagtacttggatgcgaggctcaggacctctac

SEQ ID NO: 2678 - protein, 1457 aa, synthetic construct
  REGION 1..1457: note = Variant of human B-domain deleted Factor VIII
MQIELSTCFFLCLLRFCFSATRRYYLGAVELSWDYMQSDLGELPVDARFPPRVPKSFPFNTSVVYKKTLFVEFTDHLFNIAKPRPPWMGLLGPTIQAEVYDTVVITLKNMASHPVSLHAVGVSYWKASEGAEYDDQTSQREKEDDKVFPGGSHTYVWQVLKENGPMASDPLCLTYSYLSHVDLVKDLNSGLIGALLVCREGSLAKEKTQTLHKFILLFAVFDEGKSWHSETKNSLMQDRDAASARAWPKMHTVNGYVNRSLPGLIGCHRKSVYWHVIGMGTTPEVHSIFLEGHTFLVRNHRQASLEISPITFLTAQTLLMDLGQFLLFCHISSHQHDGMEAYVKVDSCPEEPQLRMKNNEEAEDYDDDLTDSEMDVVRFDDDNSPSFIQLRSVAKKHPKTWVHYIAAEEEDWDYAPLVLAPDDRSYKSQYLNNGPQRIGRKYKKVRFMAYTDETFKTREAIQHESGILGPLLYGEVGDTLLIIFKNQASRPYNIYPHGITDVRPLYSRRLPKGVKHLKDFPILPGEIFKYKWTVTVEDGPTKSDPRCLTRYYSSFVNMERDLASGLIGPLLICYKESVDQRGNQIMSDKRNVILFSVFDENRSWYLTENIQRFLPNPAGVQLEDPEFQASNIMHSINGYVFDSLQLSVCLHEVAYWYILSIGAQTDFLSVFFSGYTFKHKMVYEDTLTLFPFSGETVFMSMENPGLWILGCHNSDFRNRGMTALLKVSSCDKNTGDYYEDSYEDISAYLLSKNNAIEPRSFSQNPPVLKRHQREITRTTLQSDQEEIDYDDTISVEMKKEDFDIYDEDENQSPRSFQKKTRHYFIAAVERLWDYGMSSSPHVLRNRAQSGSVPQFKKVVFQEFTDGSFTQPLYRGELNEHLGLLGPYIRAEVEDNIMVTFRNQASRPYSFYSSLISYEEDQRQGAEPRKNFVKPNETKTYFWKVQHHMAPTKDEFDCKAWAYFSDVDLEKDVHSGLIGPLLVCHTNTLNPAHGRQVTVQEFALFFTIFDETKSWYFTENMERNCRAPCNIQMEDPTFKENYRFHAINGYIMDTLPGLVMAQDQRIRWYLLSMGSNENIHSIHFSGHVFTVRKKEEYKMALYNLYPGVFETVEMLPSKAGIWRVECLIGEHLHAGMSTLFLVYSNKCQTPLGMASGHIRDFQITASGQYGQWAPKLARLHYSGSINAWSTKEPFSWIKVDLLAPMIIHGIKTQGARQKFSSLYISQFIIMYSLDGKKWQTYRGNSTGTLMVFFGNVDSSGIKHNIFNPPIIARYIRLHPTHYSIRSTLRMELMGCDLNSCSMPLGMESKAISDAQITASSYFTNMFATWSPSKARLHLQGRSNAWRPQVNNPKEWLQVDFQKTMKVTGVTTQGVKSLLTSMYVKEFLISSSQDGHQWTLFFQNGKVKVFQGNQDSFTPVVNSLDPPLLTRYLRIHPQSWVHQIALRMEVLGCEAQDLY

SEQ ID NO: 2679 - DNA, 4371 bp, synthetic construct
  misc_feature 1..4371: note = Variant of human B-domain deleted Factor VIII
  source 1..4371: mol_type = other DNA
atgcagattgaactgtctacctgcttcttcctctgtttgctgaggttctgctttagcgccactagacggtactaccttggcgctgtggagctgtcctgggactatatgcagagtgatttgggagagcttcccgtcgacgcacgatttcctcctcgcgttccaaagtcatttcccttcaacacaagcgtggtgtacaagaagacgctcttcgtcgaattcaccgatcacctgttcaatatcgccaaacccagaccaccatggatgggtcttttggggcctaccatacaagcggaggtgtatgacacagttgttatcactctcaagaacatggcttctcatccggtaagtcttcacgcagtgggcgtgtcctactggaaagcttcagaaggagccgagtatgatgatcagacatcccagagggagaaagaagacgacaaggtatttccaggtgggtctcatacctatgtgtggcaagtgctcaaagagaatggccctatggcaagcgatccgctctgtttgacttacagctacctttcacacgttgacctcgtcaaggacctcaactccgggttgattggagccttgttggtatgcagggaaggatctcttgccaaagagaagacacagaccctccacaagtttatccttctctttgctgtgttcgatgagggcaaaagttggcatagcgaaacgaagaattccctcatgcaggatcgcgacgcagccagcgccagagcttggcccaagatgcacactgtgaacggatatgtcaataggtcacttcctggcttgattgggtgtcatcggaaaagtgtctactggcacgtgatcggaatggggacaacaccagaggtccactccatatttctcgaaggccataccttccttgttcgaaaccacagacaggcatccttggagatctctcccattacctttctcactgcccaaacgctccttatggacttgggtcagttccttctcttctgccatatcagctcacaccagcatgatggtatggaagcttatgtgaaagtcgacagttgtcctgaggagccacagttgcgcatgaagaataatgaagaagccgaggattacgacgacgatctcaccgattctgagatggacgtggtgaggtttgatgacgacaactctccctccttcattcaaatccggagcgtggcgaagaaacaccccaagacttgggtccactatatagcggcggaagaggaggattgggattacgctcctcttgtattggcaccagatgaccgctcatacaaaagccagtacctcaacaacggaccgcagagaattggccggaagtataagaaagtgcgatttatggcctatacagacgaaacctttaagacaagggaggccatccagcatgagagtgggattttgggacctcttctttacggcgaagttggtgataccctcctcatcatcttcaagaatcaagcttctcgcccctataacatttacccacacgggatcactgacgttaggcctttgtatagcagaagacttcccaaaggcgtgaagcatctcaaagacttccccattttgccaggcgagatctttaagtacaaatggaccgtcacagtggaagatggaccgactaaatcagaccctcgatgccttacgcggtactattcctccttcgtgaatatggagagagatttggcaagcggactcataggaccactcctcatctgttacaaggaatctgtagaccagaggggtaaccagattatgagtgataaacgcaatgtgatcctttttagcgtcttcgacgagaaccggtcctggtacttgaccgagaatatacaaaggttccttcccaaccccgcaggcgttcagttggaagaccctgagtttcaggccagcaatattatgcactcaatcaacggctatgtgtttgatagtctccagctttctgtttgcctccatgaagtagcctattggtacatcttgtcaattggtgctcaaacagacttcctctccgtcttcttctccggctacacctttaagcacaagatggtgtatgaggacactctcacactctttccattttctggagaaaccgtgttcatgagcatggagaatccaggcctttggatcttgggttgccacaacagtgattttcgcaatcggggaatgactgctctcctcaaagtcagcagctgtgatgtgaacacaggcgactattacgaagattcttacgaggacataagtgcctacttgttgtccaagaataacgccattgagcccagatcattctcccagaatcctcccgtgcttaaaaggcatcagcgcgaaatcaccagaactactcttcagtctgatcaagaggagattgactatgacgacaccataagcgtggaaatgaagaaggaggatttcgatatctatgacgaagatgagaaccagtctccgcggagctttcagaagaagacgcgacactacttcattgcagcagtcgaaaggctttgggactacggtatgtcatcatcccctcatgtgttgcgcaatagagctcagagtggaagtgttccacagttcaagaaagtcgtctttcaagagtttacagatggcagcttcacacagcctctctatcggggcgagcttaacgaacatttgggactccttggtccctatatccgagccgaagtggaggacaacattatggttacctttaggaatcaagcctctcgcccctacagcttctactcctccctcatcagttatgaggaggatcagagacaaggcgctgaaccacggaagaactttgtgaaaccgaatgagacgaagacctacttctggaaagtacagcaccacatggcccccacaaaagacgaattcgattgcaaagcatgggcgtatttttcagacgttgacttggagaaagatgtacattcaggacttattggtcctttgttggtgtgtcacactaacactctcaatccagcccatggcaggcaggtgacagtccaggaattcgctcttttctttaccatctttgatgagaccaagtcctggtacttcacggaaaacatggagcgcaattgcagagccccctgtaacatacagatggaggaccctacctttaaggaaaattatcggttccacgcaatcaacggatacattatggatacactccctggccttgtgatggctcaggaccaacgaatcaggtggtacctcctcagcatgggttctaatgagaacatacactccattcacttttcaggacatgtgttcactgtccggaagaaagaagagtataagatggccctctacaatttgtatccaggcgtgtttgagaccgttgaaatgcttccctctaaagctggcatctggagagtagagtgcttgatcggagaacatcttcacgcaggtatgagcaccttgttcctcgtgtacagcaacaaatgtcagaccccacttggcatggccagtggacacattcgcgactttcagatcacagcatctggccagtatggacaatgggccccaaagttggctcgcctccattactccggtagcataaatgcgtggtccactaaagaacctttcagctggattaaggtcgatcttcttgcccccatgatcatccacggcattaagacacagggagcgaggcagaaattctcctccctctacatctcacagttcattattatgtatagtttggacggcaagaagtggcaaacttatagaggtaacagtactggaacactcatggtgttcttcggcaacgttgatagctctggcatcaaacacaacatctttaatcctcccataatagctcggtacatcagattgcatccgacccactacagcattaggagtacactccgaatggagcttatgggttgcgacttgaattcctgttcaatgccactcggaatggagtctaaagccatctctgatgcacagataaccgccagtagctactttacgaacatgtttgctacgtggtcaccctctaaggcaaggcttcatttgcaaggccggtctaatgcctggagacctcaggtgaacaacccgaaagaatggctccaggtggactttcagaagaccatgaaagtaacaggtgtcactactcagggagttaagtccttgctcaccagcatgtatgtgaaggagttccttatttcctcatcacaagatggccaccagtggaccctcttctttcagaatggtaaggtcaaagtgtttcagggcaatcaagacagcttcacacccgtggtgaacagtcttgatcctccactcttgacacgataccttcgaatccatccacagtcttgggttcaccagattgcattgcgcatggaagtacttggatgcgaggctcaggacctctac

SEQ ID NO: 2680 - protein, 1457 aa, synthetic construct
  REGION 1..1457: note = Variant of human B-domain deleted Factor VIII
MQIELSTCFFLCLLRFCFSATRRYYLGAVELSWDYMQSDLGELPVDARFPPRVPKSFPFNTSVVYKKTLFVEFTDHLFNIAKPRPPWMGLLGPTIQAEVYDTVVITLKNMASHPVSLHAVGVSYWKASEGAEYDDQTSQREKEDDKVFPGGSHTYVWQVLKENGPMASDPLCLTYSYLSHVDLVKDLNSGLIGALLVCREGSLAKEKTQTLHKFILLFAVFDEGKSWHSETKNSLMQDRDAASARAWPKMHTVNGYVNRSLPGLIGCHRKSVYWHVIGMGTTPEVHSIFLEGHTFLVRNHRQASLEISPITFLTAQTLLMDLGQFLLFCHISSHQHDGMEAYVKVDSCPEEPQLRMKNNEEAEDYDDDLTDSEMDVVRFDDDNSPSFIQIRSVAKKHPKTWVHYIAAEEEDWDYAPLVLAPDDRSYKSQYLNNGPQRIGRKYKKVRFMAYTDETFKTREAIQHESGILGPLLYGEVGDTLLIIFKNQASRPYNIYPHGITDVRPLYSRRLPKGVKHLKDFPILPGEIFKYKWTVTVEDGPTKSDPRCLTRYYSSFVNMERDLASGLIGPLLICYKESVDQRGNQIMSDKRNVILFSVFDENRSWYLTENIQRFLPNPAGVQLEDPEFQASNIMHSINGYVFDSLQLSVCLHEVAYWYILSIGAQTDFLSVFFSGYTFKHKMVYEDTLTLFPFSGETVFMSMENPGLWILGCHNSDFRNRGMTALLKVSSCDVNTGDYYEDSYEDISAYLLSKNNAIEPRSFSQNPPVLKRHQREITRTTLQSDQEEIDYDDTISVEMKKEDFDIYDEDENQSPRSFQKKTRHYFIAAVERLWDYGMSSSPHVLRNRAQSGSVPQFKKVVFQEFTDGSFTQPLYRGELNEHLGLLGPYIRAEVEDNIMVTFRNQASRPYSFYSSLISYEEDQRQGAEPRKNFVKPNETKTYFWKVQHHMAPTKDEFDCKAWAYFSDVDLEKDVHSGLIGPLLVCHTNTLNPAHGRQVTVQEFALFFTIFDETKSWYFTENMERNCRAPCNIQMEDPTFKENYRFHAINGYIMDTLPGLVMAQDQRIRWYLLSMGSNENIHSIHFSGHVFTVRKKEEYKMALYNLYPGVFETVEMLPSKAGIWRVECLIGEHLHAGMSTLFLVYSNKCQTPLGMASGHIRDFQITASGQYGQWAPKLARLHYSGSINAWSTKEPFSWIKVDLLAPMIIHGIKTQGARQKFSSLYISQFIIMYSLDGKKWQTYRGNSTGTLMVFFGNVDSSGIKHNIFNPPIIARYIRLHPTHYSIRSTLRMELMGCDLNSCSMPLGMESKAISDAQITASSYFTNMFATWSPSKARLHLQGRSNAWRPQVNNPKEWLQVDFQKTMKVTGVTTQGVKSLLTSMYVKEFLISSSQDGHQWTLFFQNGKVKVFQGNQDSFTPVVNSLDPPLLTRYLRIHPQSWVHQIALRMEVLGCEAQDLY

SEQ ID NO: 2681 - DNA, 4371 bp, synthetic construct
  misc_feature 1..4371: note = Variant of human B-domain deleted Factor VIII
  source 1..4371: mol_type = other DNA
atgcagattgaactgtctacctgcttcttcctctgtttgctgaggttctgctttagcgccactagacggtactaccttggcgctgtggagctgtcctgggactatatgcagagtgatttgggagagcttcccgtcgacgcacgatttcctcctcgcgttccaaagtcatttcccttcaacacaagcgtggtgtacaagaagacgctcttcgtcgaattcaccgatcacctgttcaatatcgccaaacccagaccaccatggatgggtcttttggggcctaccatacaagcggaggtgtatgacacagttgttatcactctcaagaacatggcttctcatccggtaagtcttcacgcagtgggcgtgtcctactggaaagcttcagaaggagccgagtatgatgatcagacatcccagagggagaaagaagacgacaaggtatttccaggtgggtctcatacctatgtgtggcaagtgctcaaagagaatggccctatggcaagcgatccgctctgtttgacttacagctacctttcacacgttgacctcgtcaaggacctcaactccgggttgattggagccttgttggtatgcagggaaggatctcttgccaaagagaagacacagaccctccacaagtttatccttctctttgctgtgttcgatgagggcaaaagttggcatagcgaaacgaagaattccctcatgcaggatcgcgacgcagccagcgccagagcttggcccaagatgcacactgtgaacggatatgtcaataggtcacttcctggcttgattgggtgtcatcggaaaagtgtctactggcacgtgatcggaatggggacaacaccagaggtccactccatatttctcgaaggccataccttccttgttcgaaaccacagacaggcatccttggagatctctcccattacctttctcactgcccaaacgctccttatggacttgggtcagttccttctcttctgccatatcagctcacaccagcatgatggtatggaagcttatgtgaaagtcgacagttgtcctgaggagccacagttgcgcatgaagaataatgaagaagccgaggattacgacgacgatctcaccgattctgagatggacgtggtgaggtttgatgacgacaactctccctccttcattcaaatccggagcgtggcgaagaaacaccccaagacttgggtccactatatagcggcggaagaggaggattgggattacgctcctcttgtattggcaccagatgaccgctcatacaaaagccagtacctcaacaacggaccgcagagaattggccggaagtataagaaagtgcgatttatggcctatacagacgaaacctttaagacaagggaggccatccagcatgagagtgggattttgggacctcttctttacggcgaagttggtgataccctcctcatcatcttcaagaatcaagcttctcgcccctataacatttacccacacgggatcactgacgttaggcctttgtatagcagaagacttcccaaaggcgtgaagcatctcaaagacttccccattttgccaggcgagatctttaagtacaaatggaccgtcacagtggaagatggaccgactaaatcagaccctcgatgccttacgcggtactattcctccttcgtgaatatggagagagatttggcaagcggactcataggaccactcctcatctgttacaaggaatctgtagaccagaggggtaaccagattatgagtgataaacgcaatgtgatcctttttagcgtcttcgacgagaaccggtcctggtacttgaccgagaatatacaaaggttccttcccaaccccgcaggcgttcagttggaagaccctgagtttcaggccagcaatattatgcactcaatcaacggctatgtgtttgatagtctccagctttctgtttgcctccatgaagtagcctattggtacatcttgtcaattggtgctcaaacagacttcctctccgtcttcttctccggctacacctttaagcacaagatggtgtatgaggacactctcacactctttccattttctggagaaaccgtgttcatgagcatggagaatccaggcctttggatcttgggttgccacaacagtgattttcgcaatcggggaatgactgctctcctcaaagtcagcagctgtgataagaacacaggcgactattacgaagattcttacgaggacataagtgcctacttgttgtccgataataacgccattgagcccagatcattctcccagaatcctcccgtgcttaaaaggcatcagcgcgaaatcaccagaactactcttcagtctgatcaagaggagattgactatgacgacaccataagcgtggaaatgaagaaggaggatttcgatatctatgacgaagatgagaaccagtctccgcggagctttcagaagaagacgcgacactacttcattgcagcagtcgaaaggctttgggactacggtatgtcatcatcccctcatgtgttgcgcaatagagctcagagtggaagtgttccacagttcaagaaagtcgtctttcaagagtttacagatggcagcttcacacagcctctctatcggggcgagcttaacgaacatttgggactccttggtccctatatccgagccgaagtggaggacaacattatggttacctttaggaatcaagcctctcgcccctacagcttctactcctccctcatcagttatgaggaggatcagagacaaggcgctgaaccacggaagaactttgtgaaaccgaatgagacgaagacctacttctggaaagtacagcaccacatggcccccacaaaagacgaattcgattgcaaagcatgggcgtatttttcagacgttgacttggagaaagatgtacattcaggacttattggtcctttgttggtgtgtcacactaacactctcaatccagcccatggcaggcaggtgacagtccaggaattcgctcttttctttaccatctttgatgagaccaagtcctggtacttcacggaaaacatggagcgcaattgcagagccccctgtaacatacagatggaggaccctacctttaaggaaaattatcggttccacgcaatcaacggatacattatggatacactccctggccttgtgatggctcaggaccaacgaatcaggtggtacctcctcagcatgggttctaatgagaacatacactccattcacttttcaggacatgtgttcactgtccggaagaaagaagagtataagatggccctctacaatttgtatccaggcgtgtttgagaccgttgaaatgcttccctctaaagctggcatctggagagtagagtgcttgatcggagaacatcttcacgcaggtatgagcaccttgttcctcgtgtacagcaacaaatgtcagaccccacttggcatggccagtggacacattcgcgactttcagatcacagcatctggccagtatggacaatgggccccaaagttggctcgcctccattactccggtagcataaatgcgtggtccactaaagaacctttcagctggattaaggtcgatcttcttgcccccatgatcatccacggcattaagacacagggagcgaggcagaaattctcctccctctacatctcacagttcattattatgtatagtttggacggcaagaagtggcaaacttatagaggtaacagtactggaacactcatggtgttcttcggcaacgttgatagctctggcatcaaacacaacatctttaatcctcccataatagctcggtacatcagattgcatccgacccactacagcattaggagtacactccgaatggagcttatgggttgcgacttgaattcctgttcaatgccactcggaatggagtctaaagccatctctgatgcacagataaccgccagtagctactttacgaacatgtttgctacgtggtcaccctctaaggcaaggcttcatttgcaaggccggtctaatgcctggagacctcaggtgaacaacccgaaagaatggctccaggtggactttcagaagaccatgaaagtaacaggtgtcactactcagggagttaagtccttgctcaccagcatgtatgtgaaggagttccttatttcctcatcacaagatggccaccagtggaccctcttctttcagaatggtaaggtcaaagtgtttcagggcaatcaagacagcttcacacccgtggtgaacagtcttgatcctccactcttgacacgataccttcgaatccatccacagtcttgggttcaccagattgcattgcgcatggaagtacttggatgcgaggctcaggacctctac

SEQ ID NO: 2682 - protein, 1457 aa, synthetic construct
  REGION 1..1457: note = Variant of human B-domain deleted Factor VIII
MQIELSTCFFLCLLRFCFSATRRYYLGAVELSWDYMQSDLGELPVDARFPPRVPKSFPFNTSVVYKKTLFVEFTDHLFNIAKPRPPWMGLLGPTIQAEVYDTVVITLKNMASHPVSLHAVGVSYWKASEGAEYDDQTSQREKEDDKVFPGGSHTYVWQVLKENGPMASDPLCLTYSYLSHVDLVKDLNSGLIGALLVCREGSLAKEKTQTLHKFILLFAVFDEGKSWHSETKNSLMQDRDAASARAWPKMHTVNGYVNRSLPGLIGCHRKSVYWHVIGMGTTPEVHSIFLEGHTFLVRNHRQASLEISPITFLTAQTLLMDLGQFLLFCHISSHQHDGMEAYVKVDSCPEEPQLRMKNNEEAEDYDDDLTDSEMDVVRFDDDNSPSFIQIRSVAKKHPKTWVHYIAAEEEDWDYAPLVLAPDDRSYKSQYLNNGPQRIGRKYKKVRFMAYTDETFKTREAIQHESGILGPLLYGEVGDTLLIIFKNQASRPYNIYPHGITDVRPLYSRRLPKGVKHLKDFPILPGEIFKYKWTVTVEDGPTKSDPRCLTRYYSSFVNMERDLASGLIGPLLICYKESVDQRGNQIMSDKRNVILFSVFDENRSWYLTENIQRFLPNPAGVQLEDPEFQASNIMHSINGYVFDSLQLSVCLHEVAYWYILSIGAQTDFLSVFFSGYTFKHKMVYEDTLTLFPFSGETVFMSMENPGLWILGCHNSDFRNRGMTALLKVSSCDKNTGDYYEDSYEDISAYLLSDNNAIEPRSFSQNPPVLKRHQREITRTTLQSDQEEIDYDDTISVEMKKEDFDIYDEDENQSPRSFQKKTRHYFIAAVERLWDYGMSSSPHVLRNRAQSGSVPQFKKVVFQEFTDGSFTQPLYRGELNEHLGLLGPYIRAEVEDNIMVTFRNQASRPYSFYSSLISYEEDQRQGAEPRKNFVKPNETKTYFWKVQHHMAPTKDEFDCKAWAYFSDVDLEKDVHSGLIGPLLVCHTNTLNPAHGRQVTVQEFALFFTIFDETKSWYFTENMERNCRAPCNIQMEDPTFKENYRFHAINGYIMDTLPGLVMAQDQRIRWYLLSMGSNENIHSIHFSGHVFTVRKKEEYKMALYNLYPGVFETVEMLPSKAGIWRVECLIGEHLHAGMSTLFLVYSNKCQTPLGMASGHIRDFQITASGQYGQWAPKLARLHYSGSINAWSTKEPFSWIKVDLLAPMIIHGIKTQGARQKFSSLYISQFIIMYSLDGKKWQTYRGNSTGTLMVFFGNVDSSGIKHNIFNPPIIARYIRLHPTHYSIRSTLRMELMGCDLNSCSMPLGMESKAISDAQITASSYFTNMFATWSPSKARLHLQGRSNAWRPQVNNPKEWLQVDFQKTMKVTGVTTQGVKSLLTSMYVKEFLISSSQDGHQWTLFFQNGKVKVFQGNQDSFTPVVNSLDPPLLTRYLRIHPQSWVHQIALRMEVLGCEAQDLY

SEQ ID NO: 2683 - DNA, 4371 bp, synthetic construct
  misc_feature 1..4371: note = Variant of human B-domain deleted Factor VIII
  source 1..4371: mol_type = other DNA
atgcagattgaactgtctacctgcttcttcctctgtttgctgaggttctgctttagcgccactagacggtactaccttggcgctgtggagctgtcctgggactatatgcagagtgatttgggagagcttcccgtcgacgcacgatttcctcctcgcgttccaaagtcatttcccttcaacacaagcgtggtgtacaagaagacgctcttcgtcgaattcaccgatcacctgttcaatatcgccaaacccagaccaccatggatgggtcttttggggcctaccatacaagcggaggtgtatgacacagttgttatcactctcaagaacatggcttctcatccggtaagtcttcacgcagtgggcgtgtcctactggaaagcttcagaaggagccgagtatgatgatcagacatcccagagggagaaagaagacgacaaggtatttccaggtgggtctcatacctatgtgtggcaagtgctcaaagagaatggccctatggcaagcgatccgctctgtttgacttacagctacctttcacacgttgacctcgtcaaggacctcaactccgggttgattggagccttgttggtatgcagggaaggatctcttgccaaagagaagacacagaccctccacaagtttatccttctctttgctgtgttcgatgagggcaaaagttggcatagcgaaacgaagaattccctcatgcaggatcgcgacgcagccagcgccagagcttggcccaagatgcacactgtgaacggatatgtcaataggtcacttcctggcttgattgggtgtcatcggaaaagtgtctactggcacgtgatcggaatggggacaacaccagaggtccactccatatttctcgaaggccataccttccttgttcgaaaccacagacaggcatccttggagatctctcccattacctttctcactgcccaaacgctccttatggacttgggtcagttccttctcttctgccatatcagctcacaccagcatgatggtatggaagcttatgtgaaagtcgacagttgtcctgaggagccacagttgcgcatgaagaataatgaagaagccgaggattacgacgacgatctcaccgattctgagatggacgtggtgaggtttgatgacgacaactctccctccttcattcaaatccggagcgtggcgaagaaacaccccaagacttgggtccactatatagcggcggaagaggaggattgggattacgctcctcttgtattggcaccagatgaccgctcatacaaaagccagtacctcaacaacggaccgcagagaattggccggaagtataagaaagtgcgatttatggcctatacagacgaaacctttaagacaagggaggccatccagcatgagagtgggattttgggacctcttctttacggcgaagttggtgataccctcctcatcatcttcaagaatcaagcttctcgcccctataacatttacccacacgggatcactgacgttaggcctttgtatagcagaagacttcccaaaggcgtgaagcatctcaaagacttccccattttgccaggcgagatctttaagtacaaatggaccgtcacagtggaagatggaccgactaaatcagaccctcgatgccttacgcggtactattcctccttcgtgaatatggagagagatttggcaagcggactcataggaccactcctcatctgttacaaggaatctgtagaccagaggggtaaccagattatgagtgataaacgcaatgtgatcctttttagcgtcttcgacgagaaccggtcctggtacttgaccgagaatatacaaaggttccttcccaaccccgcaggcgttcagttggaagaccctgagtttcaggccagcaatattatgcactcaatcaacggctatgtgtttgatagtctccagctttctgtttgcctccatgaagtagcctattggtacatcttgtcaattggtgctcaaacagacttcctctccgtcttcttctccggctacacctttaagcacaagatggtgtatgaggacactctcacactctttccattttctggagaaaccgtgttcatgagcatggagaatccaggcctttggatcttgggttgccacaacagtgattttcgcaatcggggaatgactgctctcctcaaagtcagcagctgtgataagaacacaggcgactattacgaagattcttacgaggacataagtgcctacttgttgtcctctaataacgccattgagcccagatcattctcccagaatcctcccgtgcttaaaaggcatcagcgcgaaatcaccagaactactcttcagtctgatcaagaggagattgactatgacgacaccataagcgtggaaatgaagaaggaggatttcgatatctatgacgaagatgagaaccagtctccgcggagctttcagaagaagacgcgacactacttcattgcagcagtcgaaaggctttgggactacggtatgtcatcatcccctcatgtgttgcgcaatagagctcagagtggaagtgttccacagttcaagaaagtcgtctttcaagagtttacagatggcagcttcacacagcctctctatcggggcgagcttaacgaacatttgggactccttggtccctatatccgagccgaagtggaggacaacattatggttacctttaggaatcaagcctctcgcccctacagcttctactcctccctcatcagttatgaggaggatcagagacaaggcgctgaaccacggaagaactttgtgaaaccgaatgagacgaagacctacttctggaaagtacagcaccacatggcccccacaaaagacgaattcgattgcaaagcatgggcgtatttttcagacgttgacttggagaaagatgtacattcaggacttattggtcctttgttggtgtgtcacactaacactctcaatccagcccatggcaggcaggtgacagtccaggaattcgctcttttctttaccatctttgatgagaccaagtcctggtacttcacggaaaacatggagcgcaattgcagagccccctgtaacatacagatggaggaccctacctttaaggaaaattatcggttccacgcaatcaacggatacattatggatacactccctggccttgtgatggctcaggaccaacgaatcaggtggtacctcctcagcatgggttctaatgagaacatacactccattcacttttcaggacatgtgttcactgtccggaagaaagaagagtataagatggccctctacaatttgtatccaggcgtgtttgagaccgttgaaatgcttccctctaaagctggcatctggagagtagagtgcttgatcggagaacatcttcacgcaggtatgagcaccttgttcctcgtgtacagcaacaaatgtcagaccccacttggcatggccagtggacacattcgcgactttcagatcacagcatctggccagtatggacaatgggccccaaagttggctcgcctccattactccggtagcataaatgcgtggtccactaaagaacctttcagctggattaaggtcgatcttcttgcccccatgatcatccacggcattaagacacagggagcgaggcagaaattctcctccctctacatctcacagttcattattatgtatagtttggacggcaagaagtggcaaacttatagaggtaacagtactggaacactcatggtgttcttcggcaacgttgatagctctggcatcaaacacaacatctttaatcctcccataatagctcggtacatcagattgcatccgacccactacagcattaggagtacactccgaatggagcttatgggttgcgacttgaattcctgttcaatgccactcggaatggagtctaaagccatctctgatgcacagataaccgccagtagctactttacgaacatgtttgctacgtggtcaccctctaaggcaaggcttcatttgcaaggccggtctaatgcctggagacctcaggtgaacaacccgaaagaatggctccaggtggactttcagaagaccatgaaagtaacaggtgtcactactcagggagttaagtccttgctcaccagcatgtatgtgaaggagttccttatttcctcatcacaagatggccaccagtggaccctcttctttcagaatggtaaggtcaaagtgtttcagggcaatcaagacagcttcacacccgtggtgaacagtcttgatcctccactcttgacacgataccttcgaatccatccacagtcttgggttcaccagattgcattgcgcatggaagtacttggatgcgaggctcaggacctctac

SEQ ID NO: 2684 - protein, 1457 aa, synthetic construct
  REGION 1..1457: note = Variant of human B-domain deleted Factor VIII
MQIELSTCFFLCLLRFCFSATRRYYLGAVELSWDYMQSDLGELPVDARFPPRVPKSFPFNTSVVYKKTLFVEFTDHLFNIAKPRPPWMGLLGPTIQAEVYDTVVITLKNMASHPVSLHAVGVSYWKASEGAEYDDQTSQREKEDDKVFPGGSHTYVWQVLKENGPMASDPLCLTYSYLSHVDLVKDLNSGLIGALLVCREGSLAKEKTQTLHKFILLFAVFDEGKSWHSETKNSLMQDRDAASARAWPKMHTVNGYVNRSLPGLIGCHRKSVYWHVIGMGTTPEVHSIFLEGHTFLVRNHRQASLEISPITFLTAQTLLMDLGQFLLFCHISSHQHDGMEAYVKVDSCPEEPQLRMKNNEEAEDYDDDLTDSEMDVVRFDDDNSPSFIQIRSVAKKHPKTWVHYIAAEEEDWDYAPLVLAPDDRSYKSQYLNNGPQRIGRKYKKVRFMAYTDETFKTREAIQHESGILGPLLYGEVGDTLLIIFKNQASRPYNIYPHGITDVRPLYSRRLPKGVKHLKDFPILPGEIFKYKWTVTVEDGPTKSDPRCLTRYYSSFVNMERDLASGLIGPLLICYKESVDQRGNQIMSDKRNVILFSVFDENRSWYLTENIQRFLPNPAGVQLEDPEFQASNIMHSINGYVFDSLQLSVCLHEVAYWYILSIGAQTDFLSVFFSGYTFKHKMVYEDTLTLFPFSGETVFMSMENPGLWILGCHNSDFRNRGMTALLKVSSCDKNTGDYYEDSYEDISAYLLSSNNAIEPRSFSQNPPVLKRHQREITRTTLQSDQEEIDYDDTISVEMKKEDFDIYDEDENQSPRSFQKKTRHYFIAAVERLWDYGMSSSPHVLRNRAQSGSVPQFKKVVFQEFTDGSFTQPLYRGELNEHLGLLGPYIRAEVEDNIMVTFRNQASRPYSFYSSLISYEEDQRQGAEPRKNFVKPNETKTYFWKVQHHMAPTKDEFDCKAWAYFSDVDLEKDVHSGLIGPLLVCHTNTLNPAHGRQVTVQEFALFFTIFDETKSWYFTENMERNCRAPCNIQMEDPTFKENYRFHAINGYIMDTLPGLVMAQDQRIRWYLLSMGSNENIHSIHFSGHVFTVRKKEEYKMALYNLYPGVFETVEMLPSKAGIWRVECLIGEHLHAGMSTLFLVYSNKCQTPLGMASGHIRDFQITASGQYGQWAPKLARLHYSGSINAWSTKEPFSWIKVDLLAPMIIHGIKTQGARQKFSSLYISQFIIMYSLDGKKWQTYRGNSTGTLMVFFGNVDSSGIKHNIFNPPIIARYIRLHPTHYSIRSTLRMELMGCDLNSCSMPLGMESKAISDAQITASSYFTNMFATWSPSKARLHLQGRSNAWRPQVNNPKEWLQVDFQKTMKVTGVTTQGVKSLLTSMYVKEFLISSSQDGHQWTLFFQNGKVKVFQGNQDSFTPVVNSLDPPLLTRYLRIHPQSWVHQIALRMEVLGCEAQDLY

SEQ ID NO: 2685 - DNA, 4371 bp, synthetic construct
  misc_feature 1..4371: note = Variant of human B-domain deleted Factor VIII
  source 1..4371: mol_type = other DNA
atgcagattgaactgtctacctgcttcttcctctgtttgctgaggttctgctttagcgccactagacggtactaccttggcgctgtggagctgtcctgggactatatgcagagtgatttgggagagcttcccgtcgacgcacgatttcctcctcgcgttccaaagtcatttcccttcaacacaagcgtggtgtacaagaagacgctcttcgtcgaattcaccgatcacctgttcaatatcgccaaacccagaccaccatggatgggtcttttggggcctaccatacaagcggaggtgtatgacacagttgttatcactctcaagaacatggcttctcatccggtaagtcttcacgcagtgggcgtgtcctactggaaagcttcagaaggagccgagtatgatgatcagacatcccagagggagaaagaagacgacaaggtatttccaggtgggtctcatacctatgtgtggcaagtgctcaaagagaatggccctatggcaagcgatccgctctgtttgacttacagctacctttcacacgttgacctcgtcaaggacctcaactccgggttgattggagccttgttggtatgcagggaaggatctcttgccaaagagaagacacagaccctccacaagtttatccttctctttgctgtgttcgatgagggcaaaagttggcatagcgaaacgaagaattccctcatgcaggatcgcgacgcagccagcgccagagcttggcccaagatgcacactgtgaacggatatgtcaataggtcacttcctggcttgattgggtgtcatcggaaaagtgtctactggcacgtgatcggaatggggacaacaccagaggtccactccatatttctcgaaggccataccttccttgttcgaaaccacagacaggcatccttggagatctctcccattacctttctcactgcccaaacgctccttatggacttgggtcagttccttctcttctgccatatcagctcacaccagcatgatggtatggaagcttatgtgaaagtcgacagttgtcctgaggagccacagttgcgcatgaagaataatgaagaagccgaggattacgacgacgatctcaccgattctgagatggacgtggtgaggtttgatgacgacaactctccctccttcattcaaatccggagcgtggcgaagaaacaccccaagacttgggtccactatatagcggcggaagaggaggattgggattacgctcctcttgtattggcaccagatgaccgctcatacaaaagccagtacctcaacaacggaccgcagagaattggccggaagtataagaaagtgcgatttatggcctatacagacgaaacctttaagacaagggaggccatccagcatgagagtgggattttgggacctcttctttacggcgaagttggtgataccctcctcatcatcttcaagaatcaagcttctcgcccctataacatttacccacacgggatcactgacgttaggcctttgtatagcagaagacttcccaaaggcgtgaagcatctcaaagacttccccattttgccaggcgagatctttaagtacaaatggaccgtcacagtggaagatggaccgactaaatcagaccctcgatgccttacgcggtactattcctccttcgtgaatatggagagagatttggcaagcggactcataggaccactcctcatctgttacaaggaatctgtagaccagaggggtaaccagattatgagtgataaacgcaatgtgatcctttttagcgtcttcgacgagaaccggtcctggtacttgaccgagaatatacaaaggttccttcccaaccccgcaggcgttcagttggaagaccctgagtttcaggccagcaatattatgcactcaatcaacggctatgtgtttgatagtctccagctttctgtttgcctccatgaagtagcctattggtacatcttgtcaattggtgctcaaacagacttcctctccgtcttcttctccggctacacctttaagcacaagatggtgtatgaggacactctcacactctttccattttctggagaaaccgtgttcatgagcatggagaatccaggcctttggatcttgggttgccacaacagtgattttcgcaatcggggaatgactgctctcctcaaagtcagcagctgtgatgataacacaggcgactattacgaagattcttacgaggacataagtgcctacttgttgtccaagaataacgccattgagcccagatcattctcccagaatcctcccgtgcttaaaaggcatcagcgcgaaatcaccagaactactcttcagtctgatcaagaggagattgactatgacgacaccataagcgtggaaatgaagaaggaggatttcgatatctatgacgaagatgagaaccagtctccgcggagctttcagaagaagacgcgacactacttcattgcagcagtcgaaaggctttgggactacggtatgtcatcatcccctcatgtgttgcgcaatagagctcagagtggaagtgttccacagttcaagaaagtcgtctttcaagagtttacagatggcagcttcacacagcctctctatcggggcgagcttaacgaacatttgggactccttggtccctatatccgagccgaagtggaggacaacattatggttacctttaggaatcaagcctctcgcccctacagcttctactcctccctcatcagttatgaggaggatcagagacaaggcgctgaaccacggaagaactttgtgaaaccgaatgagacgaagacctacttctggaaagtacagcaccacatggcccccacaaaagacgaattcgattgcaaagcatgggcgtatttttcagacgttgacttggagaaagatgtacattcaggacttattggtcctttgttggtgtgtcacactaacactctcaatccagcccatggcaggcaggtgacagtccaggaattcgctcttttctttaccatctttgatgagaccaagtcctggtacttcacggaaaacatggagcgcaattgcagagccccctgtaacatacagatggaggaccctacctttaaggaaaattatcggttccacgcaatcaacggatacattatggatacactccctggccttgtgatggctcaggaccaacgaatcaggtggtacctcctcagcatgggttctaatgagaacatacactccattcacttttcaggacatgtgttcactgtccggaagaaagaagagtataagatggccctctacaatttgtatccaggcgtgtttgagaccgttgaaatgcttccctctaaagctggcatctggagagtagagtgcttgatcggagaacatcttcacgcaggtatgagcaccttgttcctcgtgtacagcaacaaatgtcagaccccacttggcatggccagtggacacattcgcgactttcagatcacagcatctggccagtatggacaatgggccccaaagttggctcgcctccattactccggtagcataaatgcgtggtccactaaagaacctttcagctggattaaggtcgatcttcttgcccccatgatcatccacggcattaagacacagggagcgaggcagaaattctcctccctctacatctcacagttcattattatgtatagtttggacggcaagaagtggcaaacttatagaggtaacagtactggaacactcatggtgttcttcggcaacgttgatagctctggcatcaaacacaacatctttaatcctcccataatagctcggtacatcagattgcatccgacccactacagcattaggagtacactccgaatggagcttatgggttgcgacttgaattcctgttcaatgccactcggaatggagtctaaagccatctctgatgcacagataaccgccagtagctactttacgaacatgtttgctacgtggtcaccctctaaggcaaggcttcatttgcaaggccggtctaatgcctggagacctcaggtgaacaacccgaaagaatggctccaggtggactttcagaagaccatgaaagtaacaggtgtcactactcagggagttaagtccttgctcaccagcatgtatgtgaaggagttccttatttcctcatcacaagatggccaccagtggaccctcttctttcagaatggtaaggtcaaagtgtttcagggcaatcaagacagcttcacacccgtggtgaacagtcttgatcctccactcttgacacgataccttcgaatccatccacagtcttgggttcaccagattgcattgcgcatggaagtacttggatgcgaggctcaggacctctac

SEQ ID NO: 2686 - protein, 1457 aa, synthetic construct
  REGION 1..1457: note = Variant of human B-domain deleted Factor VIII
MQIELSTCFFLCLLRFCFSATRRYYLGAVELSWDYMQSDLGELPVDARFPPRVPKSFPFNTSVVYKKTLFVEFTDHLFNIAKPRPPWMGLLGPTIQAEVYDTVVITLKNMASHPVSLHAVGVSYWKASEGAEYDDQTSQREKEDDKVFPGGSHTYVWQVLKENGPMASDPLCLTYSYLSHVDLVKDLNSGLIGALLVCREGSLAKEKTQTLHKFILLFAVFDEGKSWHSETKNSLMQDRDAASARAWPKMHTVNGYVNRSLPGLIGCHRKSVYWHVIGMGTTPEVHSIFLEGHTFLVRNHRQASLEISPITFLTAQTLLMDLGQFLLFCHISSHQHDGMEAYVKVDSCPEEPQLRMKNNEEAEDYDDDLTDSEMDVVRFDDDNSPSFIQIRSVAKKHPKTWVHYIAAEEEDWDYAPLVLAPDDRSYKSQYLNNGPQRIGRKYKKVRFMAYTDETFKTREAIQHESGILGPLLYGEVGDTLLIIFKNQASRPYNIYPHGITDVRPLYSRRLPKGVKHLKDFPILPGEIFKYKWTVTVEDGPTKSDPRCLTRYYSSFVNMERDLASGLIGPLLICYKESVDQRGNQIMSDKRNVILFSVFDENRSWYLTENIQRFLPNPAGVQLEDPEFQASNIMHSINGYVFDSLQLSVCLHEVAYWYILSIGAQTDFLSVFFSGYTFKHKMVYEDTLTLFPFSGETVFMSMENPGLWILGCHNSDFRNRGMTALLKVSSCDDNTGDYYEDSYEDISAYLLSKNNAIEPRSFSQNPPVLKRHQREITRTTLQSDQEEIDYDDTISVEMKKEDFDIYDEDENQSPRSFQKKTRHYFIAAVERLWDYGMSSSPHVLRNRAQSGSVPQFKKVVFQEFTDGSFTQPLYRGELNEHLGLLGPYIRAEVEDNIMVTFRNQASRPYSFYSSLISYEEDQRQGAEPRKNFVKPNETKTYFWKVQHHMAPTKDEFDCKAWAYFSDVDLEKDVHSGLIGPLLVCHTNTLNPAHGRQVTVQEFALFFTIFDETKSWYFTENMERNCRAPCNIQMEDPTFKENYRFHAINGYIMDTLPGLVMAQDQRIRWYLLSMGSNENIHSIHFSGHVFTVRKKEEYKMALYNLYPGVFETVEMLPSKAGIWRVECLIGEHLHAGMSTLFLVYSNKCQTPLGMASGHIRDFQITASGQYGQWAPKLARLHYSGSINAWSTKEPFSWIKVDLLAPMIIHGIKTQGARQKFSSLYISQFIIMYSLDGKKWQTYRGNSTGTLMVFFGNVDSSGIKHNIFNPPIIARYIRLHPTHYSIRSTLRMELMGCDLNSCSMPLGMESKAISDAQITASSYFTNMFATWSPSKARLHLQGRSNAWRPQVNNPKEWLQVDFQKTMKVTGVTTQGVKSLLTSMYVKEFLISSSQDGHQWTLFFQNGKVKVFQGNQDSFTPVVNSLDPPLLTRYLRIHPQSWVHQIALRMEVLGCEAQDLY

SEQ ID NO: 2687 - DNA, 4371 bp, synthetic construct
  misc_feature 1..4371: note = Variant of human B-domain deleted Factor VIII
  source 1..4371: mol_type = other DNA
atgcagattgaactgtctacctgcttcttcctctgtttgctgaggttctgctttagcgccactagacggtactaccttggcgctgtggagctgtcctgggactatatgcagagtgatttgggagagcttcccgtcgacgcacgatttcctcctcgcgttccaaagtcatttcccttcaacacaagcgtggtgtacaagaagacgctcttcgtcgaattcaccgatcacctgttcaatatcgccaaacccagaccaccatggatgggtcttttggggcctaccatacaagcggaggtgtatgacacagttgttatcactctcaagaacatggcttctcatccggtaagtcttcacgcagtgggcgtgtcctactggaaagcttcagaaggagccgagtatgatgatcagacatcccagagggagaaagaagacgacaaggtatttccaggtgggtctcatacctatgtgtggcaagtgctcaaagagaatggccctatggcaagcgatccgctctgtttgacttacagctacctttcacacgttgacctcgtcaaggacctcaactccgggttgattggagccttgttggtatgcagggaaggatctcttgccaaagagaagacacagaccctccacaagtttatccttctctttgctgtgttcgatgagggcaaaagttggcatagcgaaacgaagaattccctcatgcaggatcgcgacgcagccagcgccagagcttggcccaagatgcacactgtgaacggatatgtcaataggtcacttcctggcttgattgggtgtcatcggaaaagtgtctactggcacgtgatcggaatggggacaacaccagaggtccactccatatttctcgaaggccataccttccttgttcgaaaccacagacaggcatccttggagatctctcccattacctttctcactgcccaaacgctccttatggacttgggtcagttccttctcttctgccatatcagctcacaccagcatgatggtatggaagcttatgtgaaagtcgacagttgtcctgaggagccacagttgcgcatgaagaataatgaagaagccgaggattacgacgacgatctcaccgattctgagatggacgtggtgaggtttgatgacgacaactctccctccttcattcaaatccggagcgtggcgaagaaacaccccaagacttgggtccactatatagcggcggaagaggaggattgggattacgctcctcttgtattggcaccagatgaccgctcatacaaaagccagtacctcaacaacggaccgcagagaattggccggaagtataagaaagtgcgatttatggcctatacagacgaaacctttaagacaagggaggccatccagcatgagagtgggattttgggacctcttctttacggcgaagttggtgataccctcctcatcatcttcaagaatcaagcttctcgcccctataacatttacccacacgggatcactgacgttaggcctttgtatagcagaagacttcccaaaggcgtgaagcatctcaaagacttccccattttgccaggcgagatctttaagtacaaatggaccgtcacagtggaagatggaccgactaaatcagaccctcgatgccttacgcggtactattcctccttcgtgaatatggagagagatttggcaagcggactcataggaccactcctcatctgttacaaggaatctgtagaccagaggggtaaccagattatgagtgataaacgcaatgtgatcctttttagcgtcttcgacgagaaccggtcctggtacttgaccgagaatatacaaaggttccttcccaaccccgcaggcgttcagttggaagaccctgagtttcaggccagcaatattatgcactcaatcaacggctatgtgtttgatagtctccagctttctgtttgcctccatgaagtagcctattggtacatcttgtcaattggtgctcaaacagacttcctctccgtcttcttctccggctacacctttaagcacaagatggtgtatgaggacactctcacactctttccattttctggagaaaccgtgttcatgagcatggagaatccaggcctttggatcttgggttgccacaacagtgattttcgcaatcggggaatgactgctctcctcaaagtcagcagctgtgataagaacacaggcgactattacgaagattcttacgaggacataagtgcctacttgttgtccaagaataacgccattgagcccagatcattctcccagaatcctcccgtgcttaaaaggcatcagcgcgaaatcaccagaactactcttcagtctgatcaagaggagattgactatgacgacaccataagcgtggaaatgaagaaggaggatttcgatatctatgacgaagatgagaaccagtctccgcggagctttcagaagaagacgcgacactacttcattgcagcagtcgaaaggctttgggactacggtatgtcatcatcccctcatgtgttgcgcaatagagctcagagtggaagtgttccacagttcaagaaagtcgtctttcaagagtttacagatggcagcttcacacagcctctctatcggggcgagcttaacgaacatttgggactccttggtccctatatccgagccgaagtggaggacaacattatggttacctttaggaatcaagcctctcgcccctacagcttctactcctccctcatcagttatgaggaggatcagagacaaggcgctgaaccacggaagaactttgtgaaaccgaatgagacgaagacctacttctggaaagtacagcaccacatggcccccacaaaagacgaattcgattgcaaagcatgggcgtatttttcagacgttgacttggagaaagatgtacattcaggacttattggtcctttgttggtgtgtcacactaacactctcaatccagcccatggcaggcaggtgacagtccaggaattcgctcttttctttaccatctttgatgagaccaagtcctggtacttcacggaaaacatggagcgcaattgcagagccccctgtaacatacagatggaggaccctacctttaaggaaaattatcggttccacgcaatcaacggatacattatggatacactccctggccttgtgatggctcaggaccaacgaatcaggtggtacctcctcagcatgggttctaatgagaacatacactccattcacttttcaggacatgtgttcactgtccggaagaaagaagagtataagatggccctctacaatttgtatccaggcgtgtttgagaccgttgaaatgcttccctctaaagctggcatctggagagtagagtgcttgatcggagaacatcttcacgcaggtatgagcaccttgttcctcgtgtacagcaacaaatgtcagtgtccacttggcatggccagtggacacattcgcgactttcagatcacagcatctggccagtatggacaatgggccccaaagttggctcgcctccattactccggtagcataaatgcgtggtccactaaagaacctttcagctggattaaggtcgatcttcttgcccccatgatcatccacggcattaagacacagggagcgaggcagaaattctcctccctctacatctcacagttcattattatgtatagtttggacggcaagaagtggcaaacttatagaggtaacagtactggaacactcatggtgttcttcggcaacgttgatagctctggcatcaaacacaacatctttaatcctcccataatagctcggtacatcagattgcatccgacccactacagcattaggagtacactccgaatggagcttatgggttgcgacttgaattcctgttcaatgccactcggaatggagtctaaagccatctctgatgcacagataaccgccagtagctactttacgaacatgtttgctacgtggtcaccctctaaggcaaggcttcatttgcaaggccggtctaatgcctggagacctcaggtgaacaacccgaaagaatggctccaggtggactttcagaagaccatgaaagtaacaggtgtcactactcagggagttaagtccttgctcaccagcatgtatgtgaaggagttccttatttcctcatcacaagatggccaccagtggaccctcttctttcagaatggtaaggtcaaagtgtttcagggcaatcaagacagcttcacacccgtggtgaacagtcttgatcctccactcttgacacgataccttcgaatccatccacagtcttgggttcaccagattgcattgcgcatggaagtacttggatgcgaggctcaggacctctac

SEQ ID NO: 2688 - protein, 1457 aa, synthetic construct
  REGION 1..1457: note = Variant of human B-domain deleted Factor VIII
MQIELSTCFFLCLLRFCFSATRRYYLGAVELSWDYMQSDLGELPVDARFPPRVPKSFPFNTSVVYKKTLFVEFTDHLFNIAKPRPPWMGLLGPTIQAEVYDTVVITLKNMASHPVSLHAVGVSYWKASEGAEYDDQTSQREKEDDKVFPGGSHTYVWQVLKENGPMASDPLCLTYSYLSHVDLVKDLNSGLIGALLVCREGSLAKEKTQTLHKFILLFAVFDEGKSWHSETKNSLMQDRDAASARAWPKMHTVNGYVNRSLPGLIGCHRKSVYWHVIGMGTTPEVHSIFLEGHTFLVRNHRQASLEISPITFLTAQTLLMDLGQFLLFCHISSHQHDGMEAYVKVDSCPEEPQLRMKNNEEAEDYDDDLTDSEMDVVRFDDDNSPSFIQIRSVAKKHPKTWVHYIAAEEEDWDYAPLVLAPDDRSYKSQYLNNGPQRIGRKYKKVRFMAYTDETFKTREAIQHESGILGPLLYGEVGDTLLIIFKNQASRPYNIYPHGITDVRPLYSRRLPKGVKHLKDFPILPGEIFKYKWTVTVEDGPTKSDPRCLTRYYSSFVNMERDLASGLIGPLLICYKESVDQRGNQIMSDKRNVILFSVFDENRSWYLTENIQRFLPNPAGVQLEDPEFQASNIMHSINGYVFDSLQLSVCLHEVAYWYILSIGAQTDFLSVFFSGYTFKHKMVYEDTLTLFPFSGETVFMSMENPGLWILGCHNSDFRNRGMTALLKVSSCDKNTGDYYEDSYEDISAYLLSKNNAIEPRSFSQNPPVLKRHQREITRTTLQSDQEEIDYDDTISVEMKKEDFDIYDEDENQSPRSFQKKTRHYFIAAVERLWDYGMSSSPHVLRNRAQSGSVPQFKKVVFQEFTDGSFTQPLYRGELNEHLGLLGPYIRAEVEDNIMVTFRNQASRPYSFYSSLISYEEDQRQGAEPRKNFVKPNETKTYFWKVQHHMAPTKDEFDCKAWAYFSDVDLEKDVHSGLIGPLLVCHTNTLNPAHGRQVTVQEFALFFTIFDETKSWYFTENMERNCRAPCNIQMEDPTFKENYRFHAINGYIMDTLPGLVMAQDQRIRWYLLSMGSNENIHSIHFSGHVFTVRKKEEYKMALYNLYPGVFETVEMLPSKAGIWRVECLIGEHLHAGMSTLFLVYSNKCQCPLGMASGHIRDFQITASGQYGQWAPKLARLHYSGSINAWSTKEPFSWIKVDLLAPMIIHGIKTQGARQKFSSLYISQFIIMYSLDGKKWQTYRGNSTGTLMVFFGNVDSSGIKHNIFNPPIIARYIRLHPTHYSIRSTLRMELMGCDLNSCSMPLGMESKAISDAQITASSYFTNMFATWSPSKARLHLQGRSNAWRPQVNNPKEWLQVDFQKTMKVTGVTTQGVKSLLTSMYVKEFLISSSQDGHQWTLFFQNGKVKVFQGNQDSFTPVVNSLDPPLLTRYLRIHPQSWVHQIALRMEVLGCEAQDLY

SEQ ID NO: 2689 - DNA, 4371 bp, synthetic construct
  misc_feature 1..4371: note = Variant of human B-domain deleted Factor VIII
  source 1..4371: mol_type = other DNA
atgcagattgaactgtctacctgcttcttcctctgtttgctgaggttctgctttagcgccactagacggtactaccttggcgctgtggagctgtcctgggactatatgcagagtgatttgggagagcttcccgtcgacgcacgatttcctcctcgcgttccaaagtcatttcccttcaacacaagcgtggtgtacaagaagacgctcttcgtcgaattcaccgatcacctgttcaatatcgccaaacccagaccaccatggatgggtcttttggggcctaccatacaagcggaggtgtatgacacagttgttatcactctcaagaacatggcttctcatccggtaagtcttcacgcagtgggcgtgtcctactggaaagcttcagaaggagccgagtatgatgatcagacatcccagagggagaaagaagacgacaaggtatttccaggtgggtctcatacctatgtgtggcaagtgctcaaagagaatggccctatggcaagcgatccgctctgtttgacttacagctacctttcacacgttgacctcgtcaaggacctcaactccgggttgattggagccttgttggtatgcagggaaggatctcttgccaaagagaagacacagaccctccacaagtttatccttctctttgctgtgttcgatgagggcaaaagttggcatagcgaaacgaagaattccctcatgcaggatcgcgacgcagccagcgccagagcttggcccaagatgcacactgtgaacggatatgtcaataggtcacttcctggcttgattgggtgtcatcggaaaagtgtctactggcacgtgatcggaatggggacaacaccagaggtccactccatatttctcgaaggccataccttccttgttcgaaaccacagacaggcatccttggagatctctcccattacctttctcactgcccaaacgctccttatggacttgggtcagttccttctcttctgccatatcagctcacaccagcatgatggtatggaagcttatgtgaaagtcgacagttgtcctgaggagccacagttgcgcatgaagaataatgaagaagccgaggattacgacgacgatctcaccgattctgagatggacgtggtgaggtttgatgacgacaactctccctccttcattcaaatccggagcgtggcgaagaaacaccccaagacttgggtccactatatagcggcggaagaggaggattgggattacgctcctcttgtattggcaccagatgaccgctcatacaaaagccagtacctcaacaacggaccgcagagaattggccggaagtataagaaagtgcgatttatggcctatacagacgaaacctttaagacaagggaggccatccagcatgagagtgggattttgggacctcttctttacggcgaagttggtgataccctcctcatcatcttcaagaatcaagcttctcgcccctataacatttacccacacgggatcactgacgttaggcctttgtatagcagaagacttcccaaaggcgtgaagcatctcaaagacttccccattttgccaggcgagatctttaagtacaaatggaccgtcacagtggaagatggaccgactaaatcagaccctcgatgccttacgcggtactattcctccttcgtgaatcctgagagagatttggcaagcggactcataggaccactcctcatctgttacaaggaatctgtagaccagaggggtaaccagattatgagtgataaacgcaatgtgatcctttttagcgtcttcgacgagaaccggtcctggtacttgaccgagaatatacaaaggttccttcccaaccccgcaggcgttcagttggaagaccctgagtttcaggccagcaatattatgcactcaatcaacggctatgtgtttgatagtctccagctttctgtttgcctccatgaagtagcctattggtacatcttgtcaattggtgctcaaacagacttcctctccgtcttcttctccggctacacctttaagcacaagatggtgtatgaggacactctcacactctttccattttctggagaaaccgtgttcatgagcatggagaatccaggcctttggatcttgggttgccacaacagtgattttcgcaatcggggaatgactgctctcctcaaagtcagcagctgtgataagaacacaggcgactattacgaagattcttacgaggacataagtgcctacttgttgtccaagaataacgccattgagcccagatcattctcccagaatcctcccgtgcttaaaaggcatcagcgcgaaatcaccagaactactcttcagtctgatcaagaggagattgactatgacgacaccataagcgtggaaatgaagaaggaggatttcgatatctatgacgaagatgagaaccagtctccgcggagctttcagaagaagacgcgacactacttcattgcagcagtcgaaaggctttgggactacggtatgtcatcatcccctcatgtgttgcgcaatagagctcagagtggaagtgttccacagttcaagaaagtcgtctttcaagagtttacagatggcagcttcacacagcctctctatcggggcgagcttaacgaacatttgggactccttggtccctatatccgagccgaagtggaggacaacattatggttacctttaggaatcaagcctctcgcccctacagcttctactcctccctcatcagttatgaggaggatcagagacaaggcgctgaaccacggaagaactttgtgaaaccgaatgagacgaagacctacttctggaaagtacagcaccacatggcccccacaaaagacgaattcgattgcaaagcatgggcgtatttttcagacgttgacttggagaaagatgtacattcaggacttattggtcctttgttggtgtgtcacactaacactctcaatccagcccatggcaggcaggtgacagtccaggaattcgctcttttctttaccatctttgatgagaccaagtcctggtacttcacggaaaacatggagcgcaattgcagagccccctgtaacatacagatggaggaccctacctttaaggaaaattatcggttccacgcaatcaacggatacattatggatacactccctggccttgtgatggctcaggaccaacgaatcaggtggtacctcctcagcatgggttctaatgagaacatacactccattcacttttcaggacatgtgttcactgtccggaagaaagaagagtataagatggccctctacaatttgtatccaggcgtgtttgagaccgttgaaatgcttccctctaaagctggcatctggagagtagagtgcttgatcggagaacatcttcacgcaggtatgagcaccttgttcctcgtgtacagcaacaaatgtcagaccccacttggcatggccagtggacacattcgcgactttcagatcacagcatctggccagtatggacaatgggccccaaagttggctcgcctccattactccggtagcataaatgcgtggtccactaaagaacctttcagctggattaaggtcgatcttcttgcccccatgatcatccacggcattaagacacagggagcgaggcagaaattctcctccctctacatctcacagttcattattatgtatagtttggacggcaagaagtggcaaacttatagaggtaacagtactggaacactcatggtgttcttcggcaacgttgatagctctggcatcaaacacaacatctttaatcctcccataatagctcggtacatcagattgcatccgacccactacagcattaggagtacactccgaatggagcttatgggttgcgacttgaattcctgttcaatgccactcggaatggagtctaaagccatctctgatgcacagataaccgccagtagctactttacgaacatgtttgctacgtggtcaccctctaaggcaaggcttcatttgcaaggccggtctaatgcctggagacctcaggtgaacaacccgaaagaatggctccaggtggactttcagaagaccatgaaagtaacaggtgtcactactcagggagttaagtccttgctcaccagcatgtatgtgaaggagttccttatttcctcatcacaagatggccaccagtggaccctcttctttcagaatggtaaggtcaaagtgtttcagggcaatcaagacagcttcacacccgtggtgaacagtcttgatcctccactcttgacacgataccttcgaatccatccacagtcttgggttcaccagattgcattgcgcatggaagtacttggatgcgaggctcaggacctctac

SEQ ID NO: 2690 - protein, 1457 aa, synthetic construct
  REGION 1..1457: note = Variant of human B-domain deleted Factor VIII
MQIELSTCFFLCLLRFCFSATRRYYLGAVELSWDYMQSDLGELPVDARFPPRVPKSFPFNTSVVYKKTLFVEFTDHLFNIAKPRPPWMGLLGPTIQAEVYDTVVITLKNMASHPVSLHAVGVSYWKASEGAEYDDQTSQREKEDDKVFPGGSHTYVWQVLKENGPMASDPLCLTYSYLSHVDLVKDLNSGLIGALLVCREGSLAKEKTQTLHKFILLFAVFDEGKSWHSETKNSLMQDRDAASARAWPKMHTVNGYVNRSLPGLIGCHRKSVYWHVIGMGTTPEVHSIFLEGHTFLVRNHRQASLEISPITFLTAQTLLMDLGQFLLFCHISSHQHDGMEAYVKVDSCPEEPQLRMKNNEEAEDYDDDLTDSEMDVVRFDDDNSPSFIQIRSVAKKHPKTWVHYIAAEEEDWDYAPLVLAPDDRSYKSQYLNNGPQRIGRKYKKVRFMAYTDETFKTREAIQHESGILGPLLYGEVGDTLLIIFKNQASRPYNIYPHGITDVRPLYSRRLPKGVKHLKDFPILPGEIFKYKWTVTVEDGPTKSDPRCLTRYYSSFVNPERDLASGLIGPLLICYKESVDQRGNQIMSDKRNVILFSVFDENRSWYLTENIQRFLPNPAGVQLEDPEFQASNIMHSINGYVFDSLQLSVCLHEVAYWYILSIGAQTDFLSVFFSGYTFKHKMVYEDTLTLFPFSGETVFMSMENPGLWILGCHNSDFRNRGMTALLKVSSCDKNTGDYYEDSYEDISAYLLSKNNAIEPRSFSQNPPVLKRHQREITRTTLQSDQEEIDYDDTISVEMKKEDFDIYDEDENQSPRSFQKKTRHYFIAAVERLWDYGMSSSPHVLRNRAQSGSVPQFKKVVFQEFTDGSFTQPLYRGELNEHLGLLGPYIRAEVEDNIMVTFRNQASRPYSFYSSLISYEEDQRQGAEPRKNFVKPNETKTYFWKVQHHMAPTKDEFDCKAWAYFSDVDLEKDVHSGLIGPLLVCHTNTLNPAHGRQVTVQEFALFFTIFDETKSWYFTENMERNCRAPCNIQMEDPTFKENYRFHAINGYIMDTLPGLVMAQDQRIRWYLLSMGSNENIHSIHFSGHVFTVRKKEEYKMALYNLYPGVFETVEMLPSKAGIWRVECLIGEHLHAGMSTLFLVYSNKCQTPLGMASGHIRDFQITASGQYGQWAPKLARLHYSGSINAWSTKEPFSWIKVDLLAPMIIHGIKTQGARQKFSSLYISQFIIMYSLDGKKWQTYRGNSTGTLMVFFGNVDSSGIKHNIFNPPIIARYIRLHPTHYSIRSTLRMELMGCDLNSCSMPLGMESKAISDAQITASSYFTNMFATWSPSKARLHLQGRSNAWRPQVNNPKEWLQVDFQKTMKVTGVTTQGVKSLLTSMYVKEFLISSSQDGHQWTLFFQNGKVKVFQGNQDSFTPVVNSLDPPLLTRYLRIHPQSWVHQIALRMEVLGCEAQDLY

SEQ ID NO: 2691 - DNA, 4371 bp, synthetic construct
  misc_feature 1..4371: note = Variant of human B-domain deleted Factor VIII
  source 1..4371: mol_type = other DNA
atgcagattgaactgtctacctgcttcttcctctgtttgctgaggttctgctttagcgccactagacggtactaccttggcgctgtggagctgtcctgggactatatgcagagtgatttgggagagcttcccgtcgacgcacgatttcctcctcgcgttccaaagtcatttcccttcaacacaagcgtggtgtacaagaagacgctcttcgtcgaattcaccgatcacctgttcaatatcgccaaacccagaccaccatggatgggtcttttggggcctaccatacaagcggaggtgtatgacacagttgttatcactctcaagaacatggcttctcatccggtaagtcttcacgcagtgggcgtgtcctactggaaagcttcagaaggagccgagtatgatgatcagacatcccagagggagaaagaagacgacaaggtatttccaggtgggtctcatacctatgtgtggcaagtgctcaaagagaatggccctatggcaagcgatccgctctgtttgacttacagctacctttcacacgttgacctcgtcaaggacctcaactccgggttgattggagccttgttggtatgcagggaaggatctcttgccaaagagaagacacagaccctccacaagtttatccttctctttgctgtgttcgatgagggcaaaagttggcatagcgaaacgaagaattccctcatgcaggatcgcgacgcagccagcgccagagcttggcccaagatgcacactgtgaacggatatgtcaataggtcacttcctggcttgattgggtgtcatcggaaaagtgtctactggcacgtgatcggaatggggacaacaccagaggtccactccatatttctcgaaggccataccttccttgttcgaaaccacagacaggcatccttggagatctctcccattacctttctcactgcccaaacgctccttatggacttgggtcagttccttctcttctgccatatcagctcacaccagcatgatggtatggaagcttatgtgaaagtcgacagttgtcctgaggagccacagttgcgcatgaagaataatgaagaagccgaggattacgacgacgatctcaccgattctgagatggacgtggtgaggtttgatgacgacaactctccctccttcattcaaatccggagcgtggcgaagaaacaccccaagacttgggtccactatatagcggcggaagaggaggattgggattacgctcctcttgtattggcaccagatgaccgctcatacaaaagccagtacctcaacaacggaccgcagagaattggccggaagtataagaaagtgcgatttatggcctatacagacgaaacctttaagacaagggaggccatccagcatgagagtgggattttgggacctcttctttacggcgaagttggtgataccctcctcatcatcttcaagaatcaagcttctcgcccctataacatttacccacacgggatcactgacgttaggcctttgtatagcagaagacttcccaaaggcgtgaagcatctcaaagacttccccattttgccaggcgagatctttaagtacaaatggaccgtcacagtggaagatggaccgactaaatcagaccctcgatgccttacgcggtactattcctccttcgtgaatatggagagagatttggcaagcggactcataggaccactcctcatctgttacaaggaatctgtagaccagaggggtaaccagattatgagtgataaacgcaatgtgatcctttttagcgtcttcgacgagaaccggtcctggtacttgaccgagaatatacaaaggttccttcccaaccccgcaggcgttcagttggaagaccctgagtttcaggccagcaatattatgcactcaatcaacggctatgtgtttgatagtctccagctttctgtttgcctccatgaagtagcctattggtacatcttgtcaattggtgctcaaacagacttcctctccgtcttcttctccggctacacctttaagcacaagatggtgtatgaggacactctcacactctttccattttctggagaaaccgtgttcatgagcatggagaatccaggcctttggatcttgggttgccacaacagtgattttcgcaatcggggaatgactgctctcctcaaagtcagcagctgtgataagaacacaggcgactattacgaagattcttacgaggacataagtgcctacttgttgtccaagaataacgccattgagcccagatcattctcccagaatcctcccgtgcttaaaaggcatcagcgcgaaatcaccagaactactcttcagtctgatcaagaggagattgactatgacgacaccataagcgtggaaatgaagaaggaggatttcgatatctatgacgaagatattaaccagtctccgcggagctttcagaagaagacgcgacactacttcattgcagcagtcgaaaggctttgggactacggtatgtcatcatcccctcatgtgttgcgcaatagagctcagagtggaagtgttccacagttcaagaaagtcgtctttcaagagtttacagatggcagcttcacacagcctctctatcggggcgagcttaacgaacatttgggactccttggtccctatatccgagccgaagtggaggacaacattatggttacctttaggaatcaagcctctcgcccctacagcttctactcctccctcatcagttatgaggaggatcagagacaaggcgctgaaccacggaagaactttgtgaaaccgaatgagacgaagacctacttctggaaagtacagcaccacatggcccccacaaaagacgaattcgattgcaaagcatgggcgtatttttcagacgttgacttggagaaagatgtacattcaggacttattggtcctttgttggtgtgtcacactaacactctcaatccagcccatggcaggcaggtgacagtccaggaattcgctcttttctttaccatctttgatgagaccaagtcctggtacttcacggaaaacatggagcgcaattgcagagccccctgtaacatacagatggaggaccctacctttaaggaaaattatcggttccacgcaatcaacggatacattatggatacactccctggccttgtgatggctcaggaccaacgaatcaggtggtacctcctcagcatgggttctaatgagaacatacactccattcacttttcaggacatgtgttcactgtccggaagaaagaagagtataagatggccctctacaatttgtatccaggcgtgtttgagaccgttgaaatgcttccctctaaagctggcatctggagagtagagtgcttgatcggagaacatcttcacgcaggtatgagcaccttgttcctcgtgtacagcaacaaatgtcagaccccacttggcatggccagtggacacattcgcgactttcagatcacagcatctggccagtatggacaatgggcaccaaagttggctcgcctccattactccggtagcataaatgcgtggtccactaaagaacctttcagctggattaaggtcgatcttcttgcccccatgatcatccacggcattaagacacagggagcgaggcagaaattctcctccctctacatctcacagttcattattatgtatagtttggacggcaagaagtggcaaacttatagaggtaacagtactggaacactcatggtgttcttcggcaacgttgatagctctggcatcaaacacaacatctttaatcctcccataatagctcggtacatcagattgcatccgacccactacagcattaggagtacactccgaatggagcttatgggttgcgacttgaattcctgttcaatgccactcggaatggagtctaaagccatctctgatgcacagataaccgccagtagctactttacgaacatgtttgctacgtggtcaccctctaaggcaaggcttcatttgcaaggccggtctaatgcctggagacctcaggtgaacaacccgaaagaatggctccaggtggactttcagaagaccatgaaagtaacaggtgtcactactcagggagttaagtccttgctcaccagcatgtatgtgaaggagttccttatttcctcatcacaagatggccaccagtggaccctcttctttcagaatggtaaggtcaaagtgtttcagggcaatcaagacagcttcacacccgtggtgaacagtcttgatcctccactcttgacacgataccttcgaatccatccacagtcttgggttcaccagattgcattgcgcatggaagtacttggatgcgaggctcaggacctctac

SEQ ID NO: 2692 - protein, 1457 aa, synthetic construct
  REGION 1..1457: note = Variant of human B-domain deleted Factor VIII
MQIELSTCFFLCLLRFCFSATRRYYLGAVELSWDYMQSDLGELPVDARFPPRVPKSFPFNTSVVYKKTLFVEFTDHLFNIAKPRPPWMGLLGPTIQAEVYDTVVITLKNMASHPVSLHAVGVSYWKASEGAEYDDQTSQREKEDDKVFPGGSHTYVWQVLKENGPMASDPLCLTYSYLSHVDLVKDLNSGLIGALLVCREGSLAKEKTQTLHKFILLFAVFDEGKSWHSETKNSLMQDRDAASARAWPKMHTVNGYVNRSLPGLIGCHRKSVYWHVIGMGTTPEVHSIFLEGHTFLVRNHRQASLEISPITFLTAQTLLMDLGQFLLFCHISSHQHDGMEAYVKVDSCPEEPQLRMKNNEEAEDYDDDLTDSEMDVVRFDDDNSPSFIQIRSVAKKHPKTWVHYIAAEEEDWDYAPLVLAPDDRSYKSQYLNNGPQRIGRKYKKVRFMAYTDETFKTREAIQHESGILGPLLYGEVGDTLLIIFKNQASRPYNIYPHGITDVRPLYSRRLPKGVKHLKDFPILPGEIFKYKWTVTVEDGPTKSDPRCLTRYYSSFVNMERDLASGLIGPLLICYKESVDQRGNQIMSDKRNVILFSVFDENRSWYLTENIQRFLPNPAGVQLEDPEFQASNIMHSINGYVFDSLQLSVCLHEVAYWYILSIGAQTDFLSVFFSGYTFKHKMVYEDTLTLFPFSGETVFMSMENPGLWILGCHNSDFRNRGMTALLKVSSCDKNTGDYYEDSYEDISAYLLSKNNAIEPRSFSQNPPVLKRHQREITRTTLQSDQEEIDYDDTISVEMKKEDFDIYDEDINQSPRSFQKKTRHYFIAAVERLWDYGMSSSPHVLRNRAQSGSVPQFKKVVFQEFTDGSFTQPLYRGELNEHLGLLGPYIRAEVEDNIMVTFRNQASRPYSFYSSLISYEEDQRQGAEPRKNFVKPNETKTYFWKVQHHMAPTKDEFDCKAWAYFSDVDLEKDVHSGLIGPLLVCHTNTLNPAHGRQVTVQEFALFFTIFDETKSWYFTENMERNCRAPCNIQMEDPTFKENYRFHAINGYIMDTLPGLVMAQDQRIRWYLLSMGSNENIHSIHFSGHVFTVRKKEEYKMALYNLYPGVFETVEMLPSKAGIWRVECLIGEHLHAGMSTLFLVYSNKCQTPLGMASGHIRDFQITASGQYGQWAPKLARLHYSGSINAWSTKEPFSWIKVDLLAPMIIHGIKTQGARQKFSSLYISQFIIMYSLDGKKWQTYRGNSTGTLMVFFGNVDSSGIKHNIFNPPIIARYIRLHPTHYSIRSTLRMELMGCDLNSCSMPLGMESKAISDAQITASSYFTNMFATWSPSKARLHLQGRSNAWRPQVNNPKEWLQVDFQKTMKVTGVTTQGVKSLLTSMYVKEFLISSSQDGHQWTLFFQNGKVKVFQGNQDSFTPVVNSLDPPLLTRYLRIHPQSWVHQIALRMEVLGCEAQDLY

SEQ ID NO: 2693 - DNA, 4371 bp, synthetic construct
  misc_feature 1..4371: note = Variant of human B-domain deleted Factor VIII
  source 1..4371: mol_type = other DNA
atgcagattgaactgtctacctgcttcttcctctgtttgctgaggttctgctttagcgccactagacggtactaccttggcgctgtggagctgtcctgggactatatgcagagtgatttgggagagcttcccgtcgacgcacgatttcctcctcgcgttccaaagtcatttcccttcaacacaagcgtggtgtacaagaagacgctcttcgtcgaattcaccgatcacctgttcaatatcgccaaacccagaccaccatggatgggtcttttggggcctaccatacaagcggaggtgtatgacacagttgttatcactctcaagaacatggcttctcatccggtaagtcttcacgcagtgggcgtgtcctactggaaagcttcagaaggagccgagtatgatgatcagacatcccagagggagaaagaagacgacaaggtatttccaggtgggtctcatacctatgtgtggcaagtgctcaaagagaatggccctatggcaagcgatccgctctgtttgacttacagctacctttcacacgttgacctcgtcaaggacctcaactccgggttgattggagccttgttggtatgcagggaaggatctcttgccaaagagaagacacagaccctccacaagtttatccttctctttgctgtgttcgatgagggcaaaagttggcatagcgaaacgaagaattccctcatgcaggatcgcgacgcagccagcgccagagcttggcccaagatgcacactgtgaacggatatgtcaataggtcacttcctggcttgattgggtgtcatcggaaaagtgtctactggcacgtgatcggaatggggacaacaccagaggtccactccatatttctcgaaggccataccttccttgttcgaaaccacagacaggcatccttggagatctctcccattacctttctcactgcccaaacgctccttatggacttgggtcagttccttctcttctgccatatcagctcacaccagcatgatggtatggaagcttatgtgaaagtcgacagttgtcctgaggagccacagttgcgcatgaagaataatgaagaagccgaggattacgacgacgatctcaccgattctgagatggacgtggtgaggtttgatgacgacaactctccctccttcattcaaatccggagcgtggcgaagaaacaccccaagacttgggtccactatatagcggcggaagaggaggattgggattacgctcctcttgtattggcaccagatgaccgctcatacaaaagccagtacctcaacaacggaccgcagagaattggccggaagtataagaaagtgcgatttatggcctatacagacgaaacctttaagacaagggaggccatccagcatgagagtgggattttgggacctcttctttacggcgaagttggtgataccctcctcatcatcttcaagaatcaagcttctcgcccctataacatttacccacacgggatcactgacgttaggcctttgtatagcagaagacttcccaaaggcgtgaagcatctcaaagacttccccattttgccaggcgagatctttaagtacaaatggaccgtcacagtggaagatggaccgactaaatcagaccctcgatgccttacgcggtactattcctccttcgtgaatatggagagagatttggcaagcggactcataggaccactcctcatctgttacaaggaatctgtagaccagaggggtaaccagattatgagtgataaacgcaatgtgatcctttttagcgtcttcgacgagaaccggtcctggtacttgaccgagaatatacaaaggttccttcccaaccccgcaggcgttcagttggaagaccctgagtttcaggccagcaatattatgcactcaatcaacggctatgtgtttgatagtctccagctttctgtttgcctccatgaagtagcctattggtacatcttgtcaattggtgctcaaacagacttcctctccgtcttcttctccggctacacctttaagcacaagatggtgtatgaggacactctcacactctttccattttctggagaaaccgtgttcatgagcatggagaatccaggcctttggatcttgggttgccacaacagtgattttcgcaatcggggaatgactgctctcctcaaagtcagcagctgtgataagaacacaggcgactattacgaagattcttacgaggacataagtgcctacttgtggtccaagaataacgccattgagcccagatcattctcccagaatcctcccgtgcttaaaaggcatcagcgcgaaatcaccagaactactcttcagtctgatcaagaggagattgactatgacgacaccataagcgtggaaatgaagaaggaggatttcgatatctatgacgaagatgagaaccagtctccgcggagctttcagaagaagacgcgacactacttcattgcagcagtcgaaaggctttgggactacggtatgtcatcatcccctcatgtgttgcgcaatagagctcagagtggaagtgttccacagttcaagaaagtcgtctttcaagagtttacagatggcagcttcacacagcctctctatcggggcgagcttaacgaacatttgggactccttggtccctatatccgagccgaagtggaggacaacattatggttacctttaggaatcaagcctctcgcccctacagcttctactcctccctcatcagttatgaggaggatcagagacaaggcgctgaaccacggaagaactttgtgaaaccgaatgagacgaagacctacttctggaaagtacagcaccacatggcccccacaaaagacgaattcgattgcaaagcatgggcgtatttttcagacgttgacttggagaaagatgtacattcaggacttattggtcctttgttggtgtgtcacactaacactctcaatccagcccatggcaggcaggtgacagtccaggaattcgctcttttctttaccatctttgatgagaccaagtcctggtacttcacggaaaacatggagcgcaattgcagagccccctgtaacatacagatggaggaccctacctttaaggaaaattatcggttccacgcaatcaacggatacattatggatacactccctggccttgtgatggctcaggaccaacgaatcaggtggtacctcctcagcatgggttctaatgagaacatacactccattcacttttcaggacatgtgttcactgtccggaagaaagaagagtataagatggccctctacaatttgtatccaggcgtgtttgagaccgttgaaatgcttccctctaaagctggcatctggagagtagagtgcttgatcggagaacatcttcacgcaggtatgagcaccttgttcctcgtgtacagcaacaaatgtcagaccccacttggcatggccagtggacacattcgcgactttcagatcacagcatctggccagtatggacaatgggccccaaagttggctcgcctccattactccggtagcataaatgcgtggtccactaaagaacctttcagctggattaaggtcgatcttcttgcccccatgatcatccacggcattaagacacagggagcgaggcagaaattctcctccctctacatctcacagttcattattatgtatagtttggacggcaagaagtggcaaacttatagaggtaacagtactggaacactcatggtgttcttcggcaacgttgatagctctggcatcaaacacaacatctttaatcctcccataatagctcggtacatcagattgcatccgacccactacagcattaggagtacactccgaatggagcttatgggttgcgacttgaattcctgttcaatgccactcggaatggagtctaaagccatctctgatgcacagataaccgccagtagctactttacgaacatgtttgctacgtggtcaccctctaaggcaaggcttcatttgcaaggccggtctaatgcctggagacctcaggtgaacaacccgaaagaatggctccaggtggactttcagaagaccatgaaagtaacaggtgtcactactcagggagttaagtccttgctcaccagcatgtatgtgaaggagttccttatttcctcatcacaagatggccaccagtggaccctcttctttcagaatggtaaggtcaaagtgtttcagggcaatcaagacagcttcacacccgtggtgaacagtcttgatcctccactcttgacacgataccttcgaatccatccacagtcttgggttcaccagattgcattgcgcatggaagtacttggatgcgaggctcaggacctctac

SEQ ID NO: 2694 - protein, 1457 aa, synthetic construct
  REGION 1..1457: note = Variant of human B-domain deleted Factor VIII
MQIELSTCFFLCLLRFCFSATRRYYLGAVELSWDYMQSDLGELPVDARFPPRVPKSFPFNTSVVYKKTLFVEFTDHLFNIAKPRPPWMGLLGPTIQAEVYDTVVITLKNMASHPVSLHAVGVSYWKASEGAEYDDQTSQREKEDDKVFPGGSHTYVWQVLKENGPMASDPLCLTYSYLSHVDLVKDLNSGLIGALLVCREGSLAKEKTQTLHKFILLFAVFDEGKSWHSETKNSLMQDRDAASARAWPKMHTVNGYVNRSLPGLIGCHRKSVYWHVIGMGTTPEVHSIFLEGHTFLVRNHRQASLEISPITFLTAQTLLMDLGQFLLFCHISSHQHDGMEAYVKVDSCPEEPQLRMKNNEEAEDYDDDLTDSEMDVVRFDDDNSPSFIQIRSVAKKHPKTWVHYIAAEEEDWDYAPLVLAPDDRSYKSQYLNNGPQRIGRKYKKVRFMAYTDETFKTREAIQHESGILGPLLYGEVGDTLLIIFKNQASRPYNIYPHGITDVRPLYSRRLPKGVKHLKDFPILPGEIFKYKWTVTVEDGPTKSDPRCLTRYYSSFVNMERDLASGLIGPLLICYKESVDQRGNQIMSDKRNVILFSVFDENRSWYLTENIQRFLPNPAGVQLEDPEFQASNIMHSINGYVFDSLQLSVCLHEVAYWYILSIGAQTDFLSVFFSGYTFKHKMVYEDTLTLFPFSGETVFMSMENPGLWILGCHNSDFRNRGMTALLKVSSCDKNTGDYYEDSYEDISAYLWSKNNAIEPRSFSQNPPVLKRHQREITRTTLQSDQEEIDYDDTISVEMKKEDFDIYDEDENQSPRSFQKKTRHYFIAAVERLWDYGMSSSPHVLRNRAQSGSVPQFKKVVFQEFTDGSFTQPLYRGELNEHLGLLGPYIRAEVEDNIMVTFRNQASRPYSFYSSLISYEEDQRQGAEPRKNFVKPNETKTYFWKVQHHMAPTKDEFDCKAWAYFSDVDLEKDVHSGLIGPLLVCHTNTLNPAHGRQVTVQEFALFFTIFDETKSWYFTENMERNCRAPCNIQMEDPTFKENYRFHAINGYIMDTLPGLVMAQDQRIRWYLLSMGSNENIHSIHFSGHVFTVRKKEEYKMALYNLYPGVFETVEMLPSKAGIWRVECLIGEHLHAGMSTLFLVYSNKCQTPLGMASGHIRDFQITASGQYGQWAPKLARLHYSGSINAWSTKEPFSWIKVDLLAPMIIHGIKTQGARQKFSSLYISQFIIMYSLDGKKWQTYRGNSTGTLMVFFGNVDSSGIKHNIFNPPIIARYIRLHPTHYSIRSTLRMELMGCDLNSCSMPLGMESKAISDAQITASSYFTNMFATWSPSKARLHLQGRSNAWRPQVNNPKEWLQVDFQKTMKVTGVTTQGVKSLLTSMYVKEFLISSSQDGHQWTLFFQNGKVKVFQGNQDSFTPVVNSLDPPLLTRYLRIHPQSWVHQIALRMEVLGCEAQDLY

SEQ ID NO: 2695 - DNA, 4371 bp, synthetic construct
  misc_feature 1..4371: note = Variant of human B-domain deleted Factor VIII
  source 1..4371: mol_type = other DNA
atgcagattgaactgtctacctgcttcttcctctgtttgctgaggttctgctttagcgccactagacggtactaccttggcgctgtggagctgtcctgggactatatgcagagtgatttgggagagcttcccgtcgacgcacgatttcctcctcgcgttccaaagtcatttcccttcaacacaagcgtggtgtacaagaagacgctcttcgtcgaattcaccgatcacctgttcaatatcgccaaacccagaccaccatggatgggtcttttggggcctaccatacaagcggaggtgtatgacacagttgttatcactctcaagaacatggcttctcatccggtaagtcttcacgcagtgggcgtgtcctactggaaagcttcagaaggagccgagtatgatgatcagacatcccagagggagaaagaagacgacaaggtatttccaggtgggtctcatacctatgtgtggcaagtgctcaaagagaatggccctatggcaagcgatccgctctgtttgacttacagctacctttcacacgttgacctcgtcaaggacctcaactccgggttgattggagccttgttggtatgcagggaaggatctcttgccaaagagaagacacagaccctccacaagtttatccttctctttgctgtgttcgatgagggcaaaagttggcatagcgaaacgaagaattccctcatgcaggatcgcgacgcagccagcgccagagcttggcccaagatgcacactgtgaacggatatgtcaataggtcacttcctggcttgattgggtgtcatcggaaaagtgtctactggcacgtgatcggaatggggacaacaccagaggtccactccatatttctcgaaggccataccttccttgttcgaaaccacagacaggcatccttggagatctctcccattacctttctcactgcccaaacgctccttatggacttgggtcagttccttctcttctgccatatccattcacaccagcatgatggtatggaagcttatgtgaaagtcgacagttgtcctgaggagccacagttgcgcatgaagaataatgaagaagccgaggattacgacgacgatctcaccgattctgagatggacgtggtgaggtttgatgacgacaactctccctccttcattcaaatccggagcgtggcgaagaaacaccccaagacttgggtccactatatagcggcggaagaggaggattgggattacgctcctcttgtattggcaccagatgaccgctcatacaaaagccagtacctcaacaacggaccgcagagaattggccggaagtataagaaagtgcgatttatggcctatacagacgaaacctttaagacaagggaggccatccagcatgagagtgggattttgggacctcttctttacggcgaagttggtgataccctcctcatcatcttcaagaatcaagcttctcgcccctataacatttacccacacgggatcactgacgttaggcctttgtatagcagaagacttcccaaaggcgtgaagcatctcaaagacttccccattttgccaggcgagatctttaagtacaaatggaccgtcacagtggaagatggaccgactaaatcagaccctcgatgccttacgcggtactattcctccttcgtgaatatggagagagatttggcaagcggactcataggaccactcctcatctgttacaaggaatctgtagaccagaggggtaaccagattatgagtgataaacgcaatgtgatcctttttagcgtcttcgacgagaaccggtcctggtacttgaccgagaatatacaaaggttccttcccaaccccgcaggcgttcagttggaagaccctgagtttcaggccagcaatattatgcactcaatcaacggctatgtgtttgatagtctccagctttctgtttgcctccatgaagtagcctattggtacatcttgtcaattggtgctcaaacagacttcctctccgtcttcttctccggctacacctttaagcacaagatggtgtatgaggacactctcacactctttccattttctggagaaaccgtgttcatgagcatggagaatccaggcctttggatcttgggttgccacaacagtgattttcgcaatcggggaatgactgctctcctcaaagtcagcagctgtgataagaacacaggcgactattacgaagattcttacgaggacataagtgcctacttgttgtccaagaataacgccattgagcccagatcattctcccagaatcctcccgtgcttaaaaggcatcagcgcgaaatcaccagaactactcttcagtctgatcaagaggagattgactatgacgacaccataagcgtggaaatgaagaaggaggatttcgatatctatgacgaagatgagaaccagtctccgcggagctttcagaagaagacgcgacactacttcattgcagcagtcgaaaggctttgggactacggtatgtcatcatcccctcatgtgttgcgcaatagagctcagagtggaagtgttccacagttcaagaaagtcgtctttcaagagtttacagatggcagcttcacacagcctctctatcggggcgagcttaacgaacatttgggactccttggtccctatatccgagccgaagtggaggacaacattatggttacctttaggaatcaagcctctcgcccctacagcttctactcctccctcatcagttatgaggaggatcagagacaaggcgctgaaccacggaagaactttgtgaaaccgaatgagacgaagacctacttctggaaagtacagcaccacatggcccccacaaaagacgaattcgattgcaaagcatgggcgtatttttcagacgttgacttggagaaagatgtacattcaggacttattggtcctttgttggtgtgtcacactaacactctcaatccagcccatggcaggcaggtgacagtccaggaattcgctcttttctttaccatctttgatgagaccaagtcctggtacttcacggaaaacatggagcgcaattgcagagccccctgtaacatacagatggaggaccctacctttaaggaaaattatcggttccacgcaatcaacggatacattatggatacactccctggccttgtgatggctcaggaccaacgaatcaggtggtacctcctcagcatgggttctaatgagaacatacactccattcacttttcaggacatgtgttcactgtccggaagaaagaagagtataagatggccctctacaatttgtatccaggcgtgtttgagaccgttgaaatgcttccctctaaagctggcatctggagagtagagtgcttgatcggagaacatcttcacgcaggtatgagcaccttgttcctcgtgtacagcaacaaatgtcagaccccacttggcatggccagtggacacattcgcgactttcagatcacagcatctggccagtatggacaatgggccccaaagttggctcgcctccattactccggtagcataaatgcgtggtccactaaagaacctttcagctggattaaggtcgatcttcttgcccccatgatcatccacggcattaagacacagggagcgaggcagaaattctcctccctctacatctcacagttcattattatgtatagtttggacggcaagaagtggcaaacttatagaggtaacagtactggaacactcatggtgttcttcggcaacgttgatagctctggcatcaaacacaacatctttaatcctcccataatagctcggtacatcagattgcatccgacccactacagcattaggagtacactccgaatggagcttatgggttgcgacttgaattcctgttcaatgccactcggaatggagtctaaagccatctctgatgcacagataaccgccagtagctactttacgaacatgtttgctacgtggtcaccctctaaggcaaggcttcatttgcaaggccggtctaatgcctggagacctcaggtgaacaacccgaaagaatggctccaggtggactttcagaagaccatgaaagtaacaggtgtcactactcagggagttaagtccttgctcaccagcatgtatgtgaaggagttccttatttcctcatcacaagatggccaccagtggaccctcttctttcagaatggtaaggtcaaagtgtttcagggcaatcaagacagcttcacacccgtggtgaacagtcttgatcctccactcttgacacgataccttcgaatccatccacagtcttgggttcaccagattgcattgcgcatggaagtacttggatgcgaggctcaggacctctac

SEQ ID NO: 2696 - protein, 1457 aa, synthetic construct
  REGION 1..1457: note = Variant of human B-domain deleted Factor VIII
MQIELSTCFFLCLLRFCFSATRRYYLGAVELSWDYMQSDLGELPVDARFPPRVPKSFPFNTSVVYKKTLFVEFTDHLFNIAKPRPPWMGLLGPTIQAEVYDTVVITLKNMASHPVSLHAVGVSYWKASEGAEYDDQTSQREKEDDKVFPGGSHTYVWQVLKENGPMASDPLCLTYSYLSHVDLVKDLNSGLIGALLVCREGSLAKEKTQTLHKFILLFAVFDEGKSWHSETKNSLMQDRDAASARAWPKMHTVNGYVNRSLPGLIGCHRKSVYWHVIGMGTTPEVHSIFLEGHTFLVRNHRQASLEISPITFLTAQTLLMDLGQFLLFCHIHSHQHDGMEAYVKVDSCPEEPQLRMKNNEEAEDYDDDLTDSEMDVVRFDDDNSPSFIQIRSVAKKHPKTWVHYIAAEEEDWDYAPLVLAPDDRSYKSQYLNNGPQRIGRKYKKVRFMAYTDETFKTREAIQHESGILGPLLYGEVGDTLLIIFKNQASRPYNIYPHGITDVRPLYSRRLPKGVKHLKDFPILPGEIFKYKWTVTVEDGPTKSDPRCLTRYYSSFVNMERDLASGLIGPLLICYKESVDQRGNQIMSDKRNVILFSVFDENRSWYLTENIQRFLPNPAGVQLEDPEFQASNIMHSINGYVFDSLQLSVCLHEVAYWYILSIGAQTDFLSVFFSGYTFKHKMVYEDTLTLFPFSGETVFMSMENPGLWILGCHNSDFRNRGMTALLKVSSCDKNTGDYYEDSYEDISAYLLSKNNAIEPRSFSQNPPVLKRHQREITRTTLQSDQEEIDYDDTISVEMKKEDFDIYDEDENQSPRSFQKKTRHYFIAAVERLWDYGMSSSPHVLRNRAQSGSVPQFKKVVFQEFTDGSFTQPLYRGELNEHLGLLGPYIRAEVEDNIMVTFRNQASRPYSFYSSLISYEEDQRQGAEPRKNFVKPNETKTYFWKVQHHMAPTKDEFDCKAWAYFSDVDLEKDVHSGLIGPLLVCHTNTLNPAHGRQVTVQEFALFFTIFDETKSWYFTENMERNCRAPCNIQMEDPTFKENYRFHAINGYIMDTLPGLVMAQDQRIRWYLLSMGSNENIHSIHFSGHVFTVRKKEEYKMALYNLYPGVFETVEMLPSKAGIWRVECLIGEHLHAGMSTLFLVYSNKCQTPLGMASGHIRDFQITASGQYGQWAPKLARLHYSGSINAWSTKEPFSWIKVDLLAPMIIHGIKTQGARQKFSSLYISQFIIMYSLDGKKWQTYRGNSTGTLMVFFGNVDSSGIKHNIFNPPIIARYIRLHPTHYSIRSTLRMELMGCDLNSCSMPLGMESKAISDAQITASSYFTNMFATWSPSKARLHLQGRSNAWRPQVNNPKEWLQVDFQKTMKVTGVTTQGVKSLLTSMYVKEFLISSSQDGHQWTLFFQNGKVKVFQGNQDSFTPVVNSLDPPLLTRYLRIHPQSWVHQIALRMEVLGCEAQDLY

SEQ ID NO: 2697 - DNA, 4371 bp, synthetic construct
  misc_feature 1..4371: note = Variant of human B-domain deleted Factor VIII
  source 1..4371: mol_type = other DNA
atgcagattgaactgtctacctgcttcttcctctgtttgctgaggttctgctttagcgccactagacggtactaccttggcgctgtggagctgtcctgggactatatgcagagtgatttgggagagcttcccgtcgacgcacgatttcctcctcgcgttccaaagtcatttcccttcaacacaagcgtggtgtacaagaagacgctcttcgtcgaattcaccgatcacctgttcaatatcgccaaacccagaccaccatggatgggtcttttggggcctaccatacaagcggaggtgtatgacacagttgttatcactctcaagaacatggcttctcatccggtaagtcttcacgcagtgggcgtgtcctactggaaagcttcagaaggagccgagtatgatgatcagacatcccagagggagaaagaagacgacaaggtatttccaggtgggtctcatacctatgtgtggcaagtgctcaaagagaatggccctatggcaagcgatccgctctgtttgacttacagctacctttcacacgttgacctcgtcaaggacctcaactccgggttgattggagccttgttggtatgcagggaaggatctcttgccaaagagaagacacagaccctccacaagtttatccttctctttgctgtgttcgatgagggcaaaagttggcatagcgaaacgaagaattccctcatgcaggatcgcgacgcagccagcgccagagcttggcccaagatgcacactgtgaacggatatgtcaataggtcacttcctggcttgattgggtgtcatcggaaaagtgtctactggcacgtgatcggaatggggacaacaccagaggtccactccatatttctcgaaggccataccttccttgttcgaaaccacagacaggcatccttggagatctctcccattacctttctcactgcccaaacgctccttatggacttgggtcagttccttctcttctgccatatcagctcacaccagcatgatggtatggaagcttatgtgaaagtcgacagttgtcctgaggagccacagttgcgcatgaagaataatgaagaagccgaggattacgacgacgatctcaccgattctgagatggacgtggtgaggtttgatgacgacaactctccctccttcattcaaatccggagcgtggcgaagaaacaccccaagacttgggtccactatatagcggcggaagaggaggattgggattacgctcctcttgtattggcaccagatgaccgctcatacaaaagccagtacctcaacaacggaccgcagagaattggccggaagtataagaaagtgcgatttatggcctatacagacgaaacctttaagacaagggaggccatccagcatgagagtgggattttgggacctcttctttacggcgaagttggtgataccctcctcatcatcttcaagaatcaagcttctcgcccctataacatttacccacacgggatcactgacgttaggcctttgtatagcagaagacttcccaaaggcgtgaagcatctcaaagacttccccattttgccaggcgagatctttaagtacaaatggaccgtcacagtggaagatggaccgactaaatcagaccctcgatgccttacgcggtactattcctccttcgtgaatatggagagagatttggcaagcggactcataggaccactcctcatctgttacaaggaatctgtagaccagaggggtaaccagattatgagtgataaacgcaatgtgatcctttttagcgtcttcgacgagaaccggtcctggtacttgaccgagaatatacaaaggttccttcccaaccccgcaggcgttcagttggaagaccctgagtttcaggccagcaatattatgcactcaatcaacggctatgtgtttgatagtctccagctttctgtttgcctccatgaagtagcctattggtacatcttgtcaattggtgctcaaacagacttcctctccgtcttcttctccggctacacctttaagcacaagatggtgtatgaggacactctcacactctttccattttctggagaaaccgtgttcatgagcatggagaatccaggcctttggatcttgggttgccacaacagtgattttcgcaatcggggaatgactgctctcctcaaagtcagcagctgtgataagaacacaggcgactattacgaagattcttacgaggacataagtgcctacttgttgtccaagaataacgccattgagcccagatcattctcccagaatcctcccgtgcttaaaaggcatcagcgcgaaatcaccagaactactcttcagtctgatcaagaggagattgactatgacgacaccataagcgtggaaatgaagaagccggatttcgatatctatgacgaagatgagaaccagtctccgcggagctttcagaagaagacgcgacactacttcattgcagcagtcgaaaggctttgggactacggtatgtcatcatcccctcatgtgttgcgcaatagagctcagagtggaagtgttccacagttcaagaaagtcgtctttcaagagtttacagatggcagcttcacacagcctctctatcggggcgagcttaacgaacatttgggactccttggtccctatatccgagccgaagtggaggacaacattatggttacctttaggaatcaagcctctcgcccctacagcttctactcctccctcatcagttatgaggaggatcagagacaaggcgctgaaccacggaagaactttgtgaaaccgaatgagacgaagacctacttctggaaagtacagcaccacatggcccccacaaaagacgaattcgattgcaaagcatgggcgtatttttcagacgttgacttggagaaagatgtacattcaggacttattggtcctttgttggtgtgtcacactaacactctcaatccagcccatggcaggcaggtgacagtccaggaattcgctcttttctttaccatctttgatgagaccaagtcctggtacttcacggaaaacatggagcgcaattgcagagccccctgtaacatacagatggaggaccctacctttaaggaaaattatcggttccacgcaatcaacggatacattatggatacactccctggccttgtgatggctcaggaccaacgaatcaggtggtacctcctcagcatgggttctaatgagaacatacactccattcacttttcaggacatgtgttcactgtccggaagaaagaagagtataagatggccctctacaatttgtatccaggcgtgtttgagaccgttgaaatgcttccctctaaagctggcatctggagagtagagtgcttgatcggagaacatcttcacgcaggtatgagcaccttgttcctcgtgtacagcaacaaatgtcagaccccacttggcatggccagtggacacattcgcgactttcagatcacagcatctggccagtatggacaatgggccccaaagttggctcgcctccattactccggtagcataaatgcgtggtccactaaagaacctttcagctggattaaggtcgatcttcttgcccccatgatcatccacggcattaagacacagggagcgaggcagaaattctcctccctctacatctcacagttcattattatgtatagtttggacggcaagaagtggcaaacttatagaggtaacagtactggaacactcatggtgttcttcggcaacgttgatagctctggcatcaaacacaacatctttaatcctcccataatagctcggtacatcagattgcatccgacccactacagcattaggagtacactccgaatggagcttatgggttgcgacttgaattcctgttcaatgccactcggaatggagtctaaagccatctctgatgcacagataaccgccagtagctactttacgaacatgtttgctacgtggtcaccctctaaggcaaggcttcatttgcaaggccggtctaatgcctggagacctcaggtgaacaacccgaaagaatggctccaggtggactttcagaagaccatgaaagtaacaggtgtcactactcagggagttaagtccttgctcaccagcatgtatgtgaaggagttccttatttcctcatcacaagatggccaccagtggaccctcttctttcagaatggtaaggtcaaagtgtttcagggcaatcaagacagcttcacacccgtggtgaacagtcttgatcctccactcttgacacgataccttcgaatccatccacagtcttgggttcaccagattgcattgcgcatggaagtacttggatgcgaggctcaggacctctac

SEQ ID NO: 2698 - protein, 1457 aa, synthetic construct
  REGION 1..1457: note = Variant of human B-domain deleted Factor VIII
MQIELSTCFFLCLLRFCFSATRRYYLGAVELSWDYMQSDLGELPVDARFPPRVPKSFPFNTSVVYKKTLFVEFTDHLFNIAKPRPPWMGLLGPTIQAEVYDTVVITLKNMASHPVSLHAVGVSYWKASEGAEYDDQTSQREKEDDKVFPGGSHTYVWQVLKENGPMASDPLCLTYSYLSHVDLVKDLNSGLIGALLVCREGSLAKEKTQTLHKFILLFAVFDEGKSWHSETKNSLMQDRDAASARAWPKMHTVNGYVNRSLPGLIGCHRKSVYWHVIGMGTTPEVHSIFLEGHTFLVRNHRQASLEISPITFLTAQTLLMDLGQFLLFCHISSHQHDGMEAYVKVDSCPEEPQLRMKNNEEAEDYDDDLTDSEMDVVRFDDDNSPSFIQIRSVAKKHPKTWVHYIAAEEEDWDYAPLVLAPDDRSYKSQYLNNGPQRIGRKYKKVRFMAYTDETFKTREAIQHESGILGPLLYGEVGDTLLIIFKNQASRPYNIYPHGITDVRPLYSRRLPKGVKHLKDFPILPGEIFKYKWTVTVEDGPTKSDPRCLTRYYSSFVNMERDLASGLIGPLLICYKESVDQRGNQIMSDKRNVILFSVFDENRSWYLTENIQRFLPNPAGVQLEDPEFQASNIMHSINGYVFDSLQLSVCLHEVAYWYILSIGAQTDFLSVFFSGYTFKHKMVYEDTLTLFPFSGETVFMSMENPGLWILGCHNSDFRNRGMTALLKVSSCDKNTGDYYEDSYEDISAYLLSKNNAIEPRSFSQNPPVLKRHQREITRTTLQSDQEEIDYDDTISVEMKKPDFDIYDEDENQSPRSFQKKTRHYFIAAVERLWDYGMSSSPHVLRNRAQSGSVPQFKKVVFQEFTDGSFTQPLYRGELNEHLGLLGPYIRAEVEDNIMVTFRNQASRPYSFYSSLISYEEDQRQGAEPRKNFVKPNETKTYFWKVQHHMAPTKDEFDCKAWAYFSDVDLEKDVHSGLIGPLLVCHTNTLNPAHGRQVTVQEFALFFTIFDETKSWYFTENMERNCRAPCNIQMEDPTFKENYRFHAINGYIMDTLPGLVMAQDQRIRWYLLSMGSNENIHSIHFSGHVFTVRKKEEYKMALYNLYPGVFETVEMLPSKAGIWRVECLIGEHLHAGMSTLFLVYSNKCQTPLGMASGHIRDFQITASGQYGQWAPKLARLHYSGSINAWSTKEPFSWIKVDLLAPMIIHGIKTQGARQKFSSLYISQFIIMYSLDGKKWQTYRGNSTGTLMVFFGNVDSSGIKHNIFNPPIIARYIRLHPTHYSIRSTLRMELMGCDLNSCSMPLGMESKAISDAQITASSYFTNMFATWSPSKARLHLQGRSNAWRPQVNNPKEWLQVDFQKTMKVTGVTTQGVKSLLTSMYVKEFLISSSQDGHQWTLFFQNGKVKVFQGNQDSFTPVVNSLDPPLLTRYLRIHPQSWVHQIALRMEVLGCEAQDLY

SEQ ID NO: 2699 - DNA, 4371 bp, synthetic construct
  misc_feature 1..4371: note = Variant of human B-domain deleted Factor VIII
  source 1..4371: mol_type = other DNA
atgcagattgaactgtctacctgcttcttcctctgtttgctgaggttctgctttagcgccactagacggtactaccttggcgctgtggagctgtcctgggactatatgcagagtgatttgggagagcttcccgtcgacgcacgatttcctcctcgcgttccaaagtcatttcccttcaacacaagcgtggtgtacaagaagacgctcttcgtcgaattcaccgatcacctgttcaatatcgccaaacccagaccaccatggatgggtcttttggggcctaccatacaagcggaggtgtatgacacagttgttatcactctcaagaacatggcttctcatccggtaagtcttcacgcagtgggcgtgtcctactggaaagcttcagaaggagccgagtatgatgatcagacatcccagagggagaaagaagacgacaaggtatttccaggtgggtctcatacctatgtgtggcaagtgctcaaagagaatggccctatggcaagcgatccgctctgtttgacttacagctacctttcacacgttgacctcgtcaaggacctcaactccgggttgattggagccttgttggtatgcagggaaggatctcttgccaaagagaagacacagaccctccacaagtttatccttctctttgctgtgttcgatgagggcaaaagttggcatagcgaaacgaagaattccctcatgcaggatcgcgacgcagccagcgccagagcttggcccaagatgcacactgtgaacggatatgtcaataggtcacttcctggcttgattgggtgtcatcggaaaagtgtctactggcacgtgatcggaatggggacaacaccagaggtccactccatatttctcgaaggccataccttccttgttcgaaaccacagacaggcatccttggagatctctcccattacctttctcactgcccaaacgctccttatggacttgggtcagttccttctcttctgccatatcagctcacaccagcatgatggtatggaagcttatgtgaaagtcgacagttgtcctgaggagccacagttgcgcatgaagaataatgaagaagccgaggattacgacgacgatctcaccgattctgagatggacgtggtgaggtttgatgacgacaactctccctccttcattcaaatccggagcgtggcgaagaaacaccccaagacttgggtccactatatagcggcggaagaggaggattgggattacgctcctcttgtattggcaccagatgaccgctcatacaaaagccagtacctcaacaacggaccgcagagaattggccggaagtataagaaagtgcgatttatggcctatacagacgaaacctttaagacaagggaggccatccagcatgagagtgggattttgggacctcttctttacggcgaagttggtgataccctcctcatcatcttcaagaatcaagcttctcgcccctataacatttacccacacgggatcactgacgttaggcctttgtatagcagaagacttcccaaaggcgtgaagcatctcaaagacttccccattttgccaggcgagatctttaagtacaaatggaccgtcacagtggaagatggaccgactaaatcagaccctcgatgccttacgcggtactattcctccttcgtgaatatggagagagatttggcaagcggactcataggaccactcctcatctgttacaaggaatctgtagaccagaggggtaaccagattatgagtgataaacgcaatgtgatcctttttagcgtcttcgacgagaaccggtcctggtacttgaccgagaatatacaaaggttccttcccaaccccgcaggcgttcagttggaagaccctgagtttcaggccagcaatattatgcactcaatcaacggctatgtgtttgatagtctccagctttctgtttgcctccatgaagtagcctattggtacatcttgtcaattggtgctcaaacagacttcctctccgtcttcttctccggctacacctttaagcacaagatggtgtatgaggacactctcacactctttccattttctggagaaaccgtgttcatgagcatggagaatccaggcctttggatcttgggttgccacaacagtgattttcgcaatcggggaatgactgctctcctcaaagtcagcagctgtgatcggaacacaggcgactattacgaagattcttacgaggacataagtgcctacttgttgtccaagaataacgccattgagcccagatcattctcccagaatcctcccgtgcttaaaaggcatcagcgcgaaatcaccagaactactcttcagtctgatcaagaggagattgactatgacgacaccataagcgtggaaatgaagaaggaggatttcgatatctatgacgaagatgagaaccagtctccgcggagctttcagaagaagacgcgacactacttcattgcagcagtcgaaaggctttgggactacggtatgtcatcatcccctcatgtgttgcgcaatagagctcagagtggaagtgttccacagttcaagaaagtcgtctttcaagagtttacagatggcagcttcacacagcctctctatcggggcgagcttaacgaacatttgggactccttggtccctatatccgagccgaagtggaggacaacattatggttacctttaggaatcaagcctctcgcccctacagcttctactcctccctcatcagttatgaggaggatcagagacaaggcgctgaaccacggaagaactttgtgaaaccgaatgagacgaagacctacttctggaaagtacagcaccacatggcccccacaaaagacgaattcgattgcaaagcatgggcgtatttttcagacgttgacttggagaaagatgtacattcaggacttattggtcctttgttggtgtgtcacactaacactctcaatccagcccatggcaggcaggtgacagtccaggaattcgctcttttctttaccatctttgatgagaccaagtcctggtacttcacggaaaacatggagcgcaattgcagagccccctgtaacatacagatggaggaccctacctttaaggaaaattatcggttccacgcaatcaacggatacattatggatacactccctggccttgtgatggctcaggaccaacgaatcaggtggtacctcctcagcatgggttctaatgagaacatacactccattcacttttcaggacatgtgttcactgtccggaagaaagaagagtataagatggccctctacaatttgtatccaggcgtgtttgagaccgttgaaatgcttccctctaaagctggcatctggagagtagagtgcttgatcggagaacatcttcacgcaggtatgagcaccttgttcctcgtgtacagcaacaaatgtcagaccccacttggcatggccagtggacacattcgcgactttcagatcacagcatctggccagtatggacaatgggccccaaagttggctcgcctccattactccggtagcataaatgcgtggtccactaaagaacctttcagctggattaaggtcgatcttcttgcccccatgatcatccacggcattaagacacagggagcgaggcagaaattctcctccctctacatctcacagttcattattatgtatagtttggacggcaagaagtggcaaacttatagaggtaacagtactggaacactcatggtgttcttcggcaacgttgatagctctggcatcaaacacaacatctttaatcctcccataatagctcggtacatcagattgcatccgacccactacagcattaggagtacactccgaatggagcttatgggttgcgacttgaattcctgttcaatgccactcggaatggagtctaaagccatctctgatgcacagataaccgccagtagctactttacgaacatgtttgctacgtggtcaccctctaaggcaaggcttcatttgcaaggccggtctaatgcctggagacctcaggtgaacaacccgaaagaatggctccaggtggactttcagaagaccatgaaagtaacaggtgtcactactcagggagttaagtccttgctcaccagcatgtatgtgaaggagttccttatttcctcatcacaagatggccaccagtggaccctcttctttcagaatggtaaggtcaaagtgtttcagggcaatcaagacagcttcacacccgtggtgaacagtcttgatcctccactcttgacacgataccttcgaatccatccacagtcttgggttcaccagattgcattgcgcatggaagtacttggatgcgaggctcaggacctctac

SEQ ID NO: 2700 - protein, 1457 aa, synthetic construct
  REGION 1..1457: note = Variant of human B-domain deleted Factor VIII
MQIELSTCFFLCLLRFCFSATRRYYLGAVELSWDYMQSDLGELPVDARFPPRVPKSFPFNTSVVYKKTLFVEFTDHLFNIAKPRPPWMGLLGPTIQAEVYDTVVITLKNMASHPVSLHAVGVSYWKASEGAEYDDQTSQREKEDDKVFPGGSHTYVWQVLKENGPMASDPLCLTYSYLSHVDLVKDLNSGLIGALLVCREGSLAKEKTQTLHKFILLFAVFDEGKSWHSETKNSLMQDRDAASARAWPKMHTVNGYVNRSLPGLIGCHRKSVYWHVIGMGTTPEVHSIFLEGHTFLVRNHRQASLEISPITFLTAQTLLMDLGQFLLFCHISSHQHDGMEAYVKVDSCPEEPQLRMKNNEEAEDYDDDLTDSEMDVVRFDDDNSPSFIQIRSVAKKHPKTWVHYIAAEEEDWDYAPLVLAPDDRSYKSQYLNNGPQRIGRKYKKVRFMAYTDETFKTREAIQHESGILGPLLYGEVGDTLLIIFKNQASRPYNIYPHGITDVRPLYSRRLPKGVKHLKDFPILPGEIFKYKWTVTVEDGPTKSDPRCLTRYYSSFVNMERDLASGLIGPLLICYKESVDQRGNQIMSDKRNVILFSVFDENRSWYLTENIQRFLPNPAGVQLEDPEFQASNIMHSINGYVFDSLQLSVCLHEVAYWYILSIGAQTDFLSVFFSGYTFKHKMVYEDTLTLFPFSGETVFMSMENPGLWILGCHNSDFRNRGMTALLKVSSCDRNTGDYYEDSYEDISAYLLSKNNAIEPRSFSQNPPVLKRHQREITRTTLQSDQEEIDYDDTISVEMKKEDFDIYDEDENQSPRSFQKKTRHYFIAAVERLWDYGMSSSPHVLRNRAQSGSVPQFKKVVFQEFTDGSFTQPLYRGELNEHLGLLGPYIRAEVEDNIMVTFRNQASRPYSFYSSLISYEEDQRQGAEPRKNFVKPNETKTYFWKVQHHMAPTKDEFDCKAWAYFSDVDLEKDVHSGLIGPLLVCHTNTLNPAHGRQVTVQEFALFFTIFDETKSWYFTENMERNCRAPCNIQMEDPTFKENYRFHAINGYIMDTLPGLVMAQDQRIRWYLLSMGSNENIHSIHFSGHVFTVRKKEEYKMALYNLYPGVFETVEMLPSKAGIWRVECLIGEHLHAGMSTLFLVYSNKCQTPLGMASGHIRDFQITASGQYGQWAPKLARLHYSGSINAWSTKEPFSWIKVDLLAPMIIHGIKTQGARQKFSSLYISQFIIMYSLDGKKWQTYRGNSTGTLMVFFGNVDSSGIKHNIFNPPIIARYIRLHPTHYSIRSTLRMELMGCDLNSCSMPLGMESKAISDAQITASSYFTNMFATWSPSKARLHLQGRSNAWRPQVNNPKEWLQVDFQKTMKVTGVTTQGVKSLLTSMYVKEFLISSSQDGHQWTLFFQNGKVKVFQGNQDSFTPVVNSLDPPLLTRYLRIHPQSWVHQIALRMEVLGCEAQDLY

SEQ ID NO: 2701 - DNA, 4371 bp, synthetic construct
  misc_feature 1..4371: note = Variant of human B-domain deleted Factor VIII
  source 1..4371: mol_type = other DNA
atgcagattgaactgtctacctgcttcttcctctgtttgctgaggttctgctttagcgccactagacggtactaccttggcgctgtggagctgtcctgggactatatgcagagtgatttgggagagcttcccgtcgacgcacgatttcctcctcgcgttccaaagtcatttcccttcaacacaagcgtggtgtacaagaagacgctcttcgtcgaattcaccgatcacctgttcaatatcgccaaacccagaccaccatggatgggtcttttggggcctaccatacaagcggaggtgtatgacacagttgttatcactctcaagaacatggcttctcatccggtaagtcttcacgcagtgggcgtgtcctactggaaagcttcagaaggagccgagtatgatgatcagacatcccagagggagaaagaagacgacaaggtatttccaggtgggtctcatacctatgtgtggcaagtgctcaaagagaatggccctatggcaagcgatccgctctgtttgacttacagctacctttcacacgttgacctcgtcaaggacctcaactccgggttgattggagccttgttggtatgcagggaaggatctcttgccaaagagaagacacagaccctccacaagtttatccttctctttgctgtgttcgatgagggcaaaagttggcatagcgaaacgaagaattccctcatgcaggatcgcgacgcagccagcgccagagcttggcccaagatgcacactgtgaacggatatgtcaataggtcacttcctggcttgattgggtgtcatcggaaaagtgtctactggcacgtgatcggaatggggacaacaccagaggtccactccatatttctcgaaggccataccttccttgttcgaaaccacagacaggcatccttggagatctctcccattacctttctcactgcccaaacgctccttatggacttgggtcagttccttctcttctgccatatcagctcacaccagcatgatggtatggaagcttatgtgaaagtcgacagttgtcctgaggagccacagttgcgcatgaagaataatgaagaagccgaggattacgacgacgatctcaccgattctgagatggacgtggtgaggtttgatgacgacaactctccctccttcattcaaatccggagcgtggcgaagaaacaccccaagacttgggtccactatatagcggcggaagaggaggattgggattacgctcctcttgtattggcaccagatgaccgctcatacaaaagccagtacctcaacaacggaccgcagagaattggccggaagtataagaaagtgcgatttatggcctatacagacgaaacctttaagacaagggaggccatccagcatgagagtgggattttgggacctcttctttacggcgaagttggtgataccctcctcatcatcttcaagaatcaagcttctcgcccctataacatttacccacacgggatcactgacgttaggcctttgtatagcagaagacttcccaaaggcgtgaagcatctcaaagacttccccattttgccaggcgagatctttaagtacaaatggaccgtcacagtggaagatggaccgactaaatcagaccctcgatgccttacgcggtactattcctccttcgtgaatatggagagagatttggcaagcggactcataggaccactcctcatctgttacaaggaatctgtagaccagaggggtaaccagattatgagtgataaacgcaatgtgatcctttttagcgtcttcgacgagaaccggtcctggtacttgaccgagaatatacaaaggttccttcccaaccccgcaggcgttcagttggaagaccctgagtttcaggccagcaatattatgcactcaatcaacggctatgtgtttgatagtctccagctttctgtttgcctccatgaagtagcctattggtacatcttgtcaattggtgctcaaacagacttcctctccgtcttcttctccggctacacctttaagcacaagatggtgtatgaggacactctcacactctttccattttctggagaaaccgtgttcatgagcatggagaatccaggcctttggatcttgggttgccacaacagtgattttcgcaatcggggaatgactgctctcctcaaagtcagcagctgtgataagaacacaggcgactattacgaagattcttacgaggacataagtgcctacttgttgtccaagaataacgccattgagcccagatcattctcccagaatcctcccgtgcttaaaaggcatcagcgcgaaatcaccagaactactcttcagtctgatcaagaggagattgactatgacgacaccataagcgtggaaatgaagaaggaggatttcgatatctatgacgaagatgagaaccagtctccgcggagctttcagaagaagacgcgacactacttcattgcagcagtcgaaaggctttgggactacggtatgtcatcatcccctcatgtgttgcgcaatagagctcagagtggaagtgttccacagttcaagaaagtcgtctttcaagagtttacagatggcagcttcacacagcctctctatcggggcgagcttaacgaacatttgggactccttggtccctatatccgagccgaagtggaggacaacattatggttacctttaggaatcaagcctctcgcccctacagcttctactcctccctcatcagttatgaggaggatcagagacaaggcgctgaaccacggaagaactttgtgaaaccgaatgagacgaagacctacttctggaaagtacagcaccacatggcccccacaaaagacgaattcgattgcaaagcatgggcgtatttttcagacgttgacttggagaaagatgtacattcaggacttattggtcctttgttggtgtgtcacactaacactctcaatccagcccatggcaggcaggtgacagtccaggaattcgctcttttctttaccatctttgatgagaccaagtcctggtacttcacggaaaacatggagcgcaattgcagagccccctgtaacatacagatggaggaccctacctttaaggaaaattatcggttccacgcaatcaacggatacattatggatacactccctggccttgtgatggctcaggaccaacgaatcaggtggtacctcctcagcatgggttctaatgagaacatacactccattcacttttcaggacatgtgttcactgtccggaagaaagaagagtataagatggccctctacaatttgtatccaggcgtgtttgagaccgttgaaatgcttccctctaaagctggcatctggagagtagagtgcttgatcggagaacatcttcacgcaggtatgagcaccttgttcctcgtgtacagcaacaaatgtcagaccccacttggcatggccagtggacacattcgcgactttcagatcacagcatctggccagtatggacaatgggccccaaagttggctcgcctccattactccggtagcataaatgcgtggtccactaaagaacctttcagctggattaaggtcgatcttcttgcccccatgatcatccacggcattaagacacagggagcgaggcagaaattctcctccctctacatctcacagttcattattatgtatagtttggacggcaagaagtggcaaacttatagaggtaacagtactggaacatggatggtgttcttcggcaacgttgatagctctggcatcaaacacaacatctttaatcctcccataatagctcggtacatcagattgcatccgacccactacagcattaggagtacactccgaatggagcttatgggttgcgacttgaattcctgttcaatgccactcggaatggagtctaaagccatctctgatgcacagataaccgccagtagctactttacgaacatgtttgctacgtggtcaccctctaaggcaaggcttcatttgcaaggccggtctaatgcctggagacctcaggtgaacaacccgaaagaatggctccaggtggactttcagaagacaatgaaagtaacaggtgtcactactcagggagttaagtccttgctcaccagcatgtatgtgaaggagttccttatttcctcatcacaagatggccaccagtggaccctcttctttcagaatggtaaggtcaaagtgtttcagggcaatcaagacagcttcacacccgtggtgaacagtcttgatcctccactcttgacacgataccttcgaatccatccacagtcttgggttcaccagattgcattgcgcatggaagtacttggatgcgaggctcaggacctctac

SEQ ID NO: 2702 - protein, 1457 aa, synthetic construct
  REGION 1..1457: note = Variant of human B-domain deleted Factor VIII
MQIELSTCFFLCLLRFCFSATRRYYLGAVELSWDYMQSDLGELPVDARFPPRVPKSFPFNTSVVYKKTLFVEFTDHLFNIAKPRPPWMGLLGPTIQAEVYDTVVITLKNMASHPVSLHAVGVSYWKASEGAEYDDQTSQREKEDDKVFPGGSHTYVWQVLKENGPMASDPLCLTYSYLSHVDLVKDLNSGLIGALLVCREGSLAKEKTQTLHKFILLFAVFDEGKSWHSETKNSLMQDRDAASARAWPKMHTVNGYVNRSLPGLIGCHRKSVYWHVIGMGTTPEVHSIFLEGHTFLVRNHRQASLEISPITFLTAQTLLMDLGQFLLFCHISSHQHDGMEAYVKVDSCPEEPQLRMKNNEEAEDYDDDLTDSEMDVVRFDDDNSPSFIQIRSVAKKHPKTWVHYIAAEEEDWDYAPLVLAPDDRSYKSQYLNNGPQRIGRKYKKVRFMAYTDETFKTREAIQHESGILGPLLYGEVGDTLLIIFKNQASRPYNIYPHGITDVRPLYSRRLPKGVKHLKDFPILPGEIFKYKWTVTVEDGPTKSDPRCLTRYYSSFVNMERDLASGLIGPLLICYKESVDQRGNQIMSDKRNVILFSVFDENRSWYLTENIQRFLPNPAGVQLEDPEFQASNIMHSINGYVFDSLQLSVCLHEVAYWYILSIGAQTDFLSVFFSGYTFKHKMVYEDTLTLFPFSGETVFMSMENPGLWILGCHNSDFRNRGMTALLKVSSCDKNTGDYYEDSYEDISAYLLSKNNAIEPRSFSQNPPVLKRHQREITRTTLQSDQEEIDYDDTISVEMKKEDFDIYDEDENQSPRSFQKKTRHYFIAAVERLWDYGMSSSPHVLRNRAQSGSVPQFKKVVFQEFTDGSFTQPLYRGELNEHLGLLGPYIRAEVEDNIMVTFRNQASRPYSFYSSLISYEEDQRQGAEPRKNFVKPNETKTYFWKVQHHMAPTKDEFDCKAWAYFSDVDLEKDVHSGLIGPLLVCHTNTLNPAHGRQVTVQEFALFFTIFDETKSWYFTENMERNCRAPCNIQMEDPTFKENYRFHAINGYIMDTLPGLVMAQDQRIRWYLLSMGSNENIHSIHFSGHVFTVRKKEEYKMALYNLYPGVFETVEMLPSKAGIWRVECLIGEHLHAGMSTLFLVYSNKCQTPLGMASGHIRDFQITASGQYGQWAPKLARLHYSGSINAWSTKEPFSWIKVDLLAPMIIHGIKTQGARQKFSSLYISQFIIMYSLDGKKWQTYRGNSTGTWMVFFGNVDSSGIKHNIFNPPIIARYIRLHPTHYSIRSTLRMELMGCDLNSCSMPLGMESKAISDAQITASSYFTNMFATWSPSKARLHLQGRSNAWRPQVNNPKEWLQVDFQKTMKVTGVTTQGVKSLLTSMYVKEFLISSSQDGHQWTLFFQNGKVKVFQGNQDSFTPVVNSLDPPLLTRYLRIHPQSWVHQIALRMEVLGCEAQDLY

SEQ ID NO: 2703 - DNA, 4371 bp, synthetic construct
  misc_feature 1..4371: note = Variant of human B-domain deleted Factor VIII
  source 1..4371: mol_type = other DNA
atgcagattgaactgtctacctgcttcttcctctgtttgctgaggttctgctttagcgccactagacggtactaccttggcgctgtggagctgtcctgggactatatgcagagtgatttgggagagcttcccgtcgacgcacgatttcctcctcgcgttccaaagtcatttcccttcaacacaagcgtggtgtacaagaagacgctcttcgtcgaattcaccgatcacctgttcaatatcgccaaacccagaccaccatggatgggtcttttggggcctaccatacaagcggaggtgtatgacacagttgttatcactctcaagaacatggcttctcatccggtaagtcttcacgcagtgggcgtgtcctactggaaagcttcagaaggagccgagtatgatgatcagacatcccagagggagaaagaagacgacaaggtatttccaggtgggtctcatacctatgtgtggcaagtgctcaaagagaatggccctatggcaagcgatccgctctgtttgacttacagctacctttcacacgttgacctcgtcaaggacctcaactccgggttgattggagccttgttggtatgcagggaaggatctcttgccaaagagaagacacagaccctccacaagtttatccttctctttgctgtgttcgatgagggcaaaagttggcatagcgaaacgaagaattccctcatgcaggatcgcgacgcagccagcgccagagcttggcccaagatgcacactgtgaacggatatgtcaataggtcacttcctggcttgattgggtgtcatcggaaaagtgtctactggcacgtgatcggaatggggacaacaccagaggtccactccatatttctcgaaggccataccttccttgttcgaaaccacagacaggcatccttggagatctctcccattacctttctcactgcccaaacgctccttatggacttgggtcagttccttctcttctgccatatcagctcacaccagcatgatggtatggaagcttatgtgaaagtcgacagttgtcctgaggagccacagttgcgcatgaagaataatgaagaagccgaggattacgacgacgatctcaccgattctgagatggacgtggtgaggtttgatgacgacaactctccctccttcattcaaatccggagcgtggcgaagaaacaccccaagacttgggtccactatatagcggcggaagaggaggattgggattacgctcctcttgtattggcaccagatgaccgctcatacaaaagccagtacctcaacaacggaccgcagagaattggccggaagtataagaaagtgcgatttatggcctatacagacgaaacctttaagacaagggaggccatccagcatgagagtgggattttgggacctcttctttacggcgaagttggtgataccctcctcatcatcttcaagaatcaagcttctcgcccctataacatttacccacacgggatcactgacgttaggcctttgtatagcagaagacttcccaaaggcgtgaagcatctcaaagacttccccattttgccaggcgagatctttaagtacaaatggaccgtcacagtggaagatggaccgactaaatcagaccctcgatgccttacgcggtactattcctccttcgtgaatatggagagagatttggcaagcggactcataggaccactcctcatctgttacaaggaatctgtagaccagaggggtaaccagattatgagtgataaacgcaatgtgatcctttttagcgtcttcgacgagaaccggtcctggtacttgaccgagaatatacaaaggttccttcccaaccccgcaggcgttcagttggaagaccctgagtttcaggccagcaatattatgcactcaatcaacggctatgtgtttgatagtctccagctttctgtttgcctccatgaagtagcctattggtacatcttgtcaattggtgctcaaacagacttcctctccgtcttcttctccggctacacctttaagcacaagatggtgtatgaggacactctcacactctttccattttctggagaaaccgtgttcatgagcatggagaatccaggcctttggatcttgggttgccacaacagtgattttcgcaatcggggaatgactgctctcctcaaagtcagcagctgtgataagaacacaggcgactattacgaagattcttacgaggacataagtgcctacttgttgtccgagaataacgccattgagcccagatcattctcccagaatcctcccgtgcttaaaaggcatcagcgcgaaatcaccagaactactcttcagtctgatcaagaggagattgactatgacgacaccataagcgtggaaatgaagaaggaggatttcgatatctatgacgaagatgagaaccagtctccgcggagctttcagaagaagacgcgacactacttcattgcagcagtcgaaaggctttgggactacggtatgtcatcatcccctcatgtgttgcgcaatagagctcagagtggaagtgttccacagttcaagaaagtcgtctttcaagagtttacagatggcagcttcacacagcctctctatcggggcgagcttaacgaacatttgggactccttggtccctatatccgagccgaagtggaggacaacattatggttacctttaggaatcaagcctctcgcccctacagcttctactcctccctcatcagttatgaggaggatcagagacaaggcgctgaaccacggaagaactttgtgaaaccgaatgagacgaagacctacttctggaaagtacagcaccacatggcccccacaaaagacgaattcgattgcaaagcatgggcgtatttttcagacgttgacttggagaaagatgtacattcaggacttattggtcctttgttggtgtgtcacactaacactctcaatccagcccatggcaggcaggtgacagtccaggaattcgctcttttctttaccatctttgatgagaccaagtcctggtacttcacggaaaacatggagcgcaattgcagagccccctgtaacatacagatggaggaccctacctttaaggaaaattatcggttccacgcaatcaacggatacattatggatacactccctggccttgtgatggctcaggaccaacgaatcaggtggtacctcctcagcatgggttctaatgagaacatacactccattcacttttcaggacatgtgttcactgtccggaagaaagaagagtataagatggccctctacaatttgtatccaggcgtgtttgagaccgttgaaatgcttccctctaaagctggcatctggagagtagagtgcttgatcggagaacatcttcacgcaggtatgagcaccttgttcctcgtgtacagcaacaaatgtcagaccccacttggcatggccagtggacacattcgcgactttcagatcacagcatctggccagtatggacaatgggccccaaagttggctcgcctccattactccggtagcataaatgcgtggtccactaaagaacctttcagctggattaaggtcgatcttcttgcccccatgatcatccacggcattaagacacagggagcgaggcagaaattctcctccctctacatctcacagttcattattatgtatagtttggacggcaagaagtggcaaacttatagaggtaacagtactggaacactcatggtgttcttcggcaacgttgatagctctggcatcaaacacaacatctttaatcctcccataatagctcggtacatcagattgcatccgacccactacagcattaggagtacactccgaatggagcttatgggttgcgacttgaattcctgttcaatgccactcggaatggagtctaaagccatctctgatgcacagataaccgccagtagctactttacgaacatgtttgctacgtggtcaccctctaaggcaaggcttcatttgcaaggccggtctaatgcctggagacctcaggtgaacaacccgaaagaatggctccaggtggactttcagaagaccatgaaagtaacaggtgtcactactcagggagttaagtccttgctcaccagcatgtatgtgaaggagttccttatttcctcatcacaagatggccaccagtggaccctcttctttcagaatggtaaggtcaaagtgtttcagggcaatcaagacagcttcacacccgtggtgaacagtcttgatcctccactcttgacacgataccttcgaatccatccacagtcttgggttcaccagattgcattgcgcatggaagtacttggatgcgaggctcaggacctctac

SEQ ID NO: 2704 - protein, 1457 aa, synthetic construct
  REGION 1..1457: note = Variant of human B-domain deleted Factor VIII
MQIELSTCFFLCLLRFCFSATRRYYLGAVELSWDYMQSDLGELPVDARFPPRVPKSFPFNTSVVYKKTLFVEFTDHLFNIAKPRPPWMGLLGPTIQAEVYDTVVITLKNMASHPVSLHAVGVSYWKASEGAEYDDQTSQREKEDDKVFPGGSHTYVWQVLKENGPMASDPLCLTYSYLSHVDLVKDLNSGLIGALLVCREGSLAKEKTQTLHKFILLFAVFDEGKSWHSETKNSLMQDRDAASARAWPKMHTVNGYVNRSLPGLIGCHRKSVYWHVIGMGTTPEVHSIFLEGHTFLVRNHRQASLEISPITFLTAQTLLMDLGQFLLFCHISSHQHDGMEAYVKVDSCPEEPQLRMKNNEEAEDYDDDLTDSEMDVVRFDDDNSPSFIQIRSVAKKHPKTWVHYIAAEEEDWDYAPLVLAPDDRSYKSQYLNNGPQRIGRKYKKVRFMAYTDETFKTREAIQHESGILGPLLYGEVGDTLLIIFKNQASRPYNIYPHGITDVRPLYSRRLPKGVKHLKDFPILPGEIFKYKWTVTVEDGPTKSDPRCLTRYYSSFVNMERDLASGLIGPLLICYKESVDQRGNQIMSDKRNVILFSVFDENRSWYLTENIQRFLPNPAGVQLEDPEFQASNIMHSINGYVFDSLQLSVCLHEVAYWYILSIGAQTDFLSVFFSGYTFKHKMVYEDTLTLFPFSGETVFMSMENPGLWILGCHNSDFRNRGMTALLKVSSCDKNTGDYYEDSYEDISAYLLSENNAIEPRSFSQNPPVLKRHQREITRTTLQSDQEEIDYDDTISVEMKKEDFDIYDEDENQSPRSFQKKTRHYFIAAVERLWDYGMSSSPHVLRNRAQSGSVPQFKKVVFQEFTDGSFTQPLYRGELNEHLGLLGPYIRAEVEDNIMVTFRNQASRPYSFYSSLISYEEDQRQGAEPRKNFVKPNETKTYFWKVQHHMAPTKDEFDCKAWAYFSDVDLEKDVHSGLIGPLLVCHTNTLNPAHGRQVTVQEFALFFTIFDETKSWYFTENMERNCRAPCNIQMEDPTFKENYRFHAINGYIMDTLPGLVMAQDQRIRWYLLSMGSNENIHSIHFSGHVFTVRKKEEYKMALYNLYPGVFETVEMLPSKAGIWRVECLIGEHLHAGMSTLFLVYSNKCQTPLGMASGHIRDFQITASGQYGQWAPKLARLHYSGSINAWSTKEPFSWIKVDLLAPMIIHGIKTQGARQKFSSLYISQFIIMYSLDGKKWQTYRGNSTGTLMVFFGNVDSSGIKHNIFNPPIIARYIRLHPTHYSIRSTLRMELMGCDLNSCSMPLGMESKAISDAQITASSYFTNMFATWSPSKARLHLQGRSNAWRPQVNNPKEWLQVDFQKTMKVTGVTTQGVKSLLTSMYVKEFLISSSQDGHQWTLFFQNGKVKVFQGNQDSFTPVVNSLDPPLLTRYLRIHPQSWVHQIALRMEVLGCEAQDLY

SEQ ID NO: 2705 - DNA, 4371 bp, synthetic construct
  misc_feature 1..4371: note = Variant of human B-domain deleted Factor VIII
  source 1..4371: mol_type = other DNA
atgcagattgaactgtctacctgcttcttcctctgtttgctgaggttctgctttagcgccactagacggtactaccttggcgctgtggagctgtcctgggactatatgcagagtgatttgggagagcttcccgtcgacgcacgatttcctcctcgcgttccaaagtcatttcccttcaacacaagctatgtgtacaagaagacgctcttcgtcgaattcaccgatcacctgttcaatatcgccaaacccagaccaccatggatgggtcttttggggcctaccatacaagcggaggtgtatgacacagttgttatcactctcaagaacatggcttctcatccggtaagtcttcacgcagtgggcgtgtcctactggaaagcttcagaaggagccgagtatgatgatcagacatcccagagggagaaagaagacgacaaggtatttccaggtgggtctcatacctatgtgtggcaagtgctcaaagagaatggccctatggcaagcgatccgctctgtttgacttacagctacctttcacacgttgacctcgtcaaggacctcaactccgggttgattggagccttgttggtatgcagggaaggatctcttgccaaagagaagacacagaccctccacaagtttatccttctctttgctgtgttcgatgagggcaaaagttggcatagcgaaacgaagaattccctcatgcaggatcgcgacgcagccagcgccagagcttggcccaagatgcacactgtgaacggatatgtcaataggtcacttcctggcttgattgggtgtcatcggaaaagtgtctactggcacgtgatcggaatggggacaacaccagaggtccactccatatttctcgaaggccataccttccttgttcgaaaccacagacaggcatccttggagatctctcccattacctttctcactgcccaaacgctccttatggacttgggtcagttccttctcttctgccatatcagctcacaccagcatgatggtatggaagcttatgtgaaagtcgacagttgtcctgaggagccacagttgcgcatgaagaataatgaagaagccgaggattacgacgacgatctcaccgattctgagatggacgtggtgaggtttgatgacgacaactctccctccttcattcaaatccggagcgtggcgaagaaacaccccaagacttgggtccactatatagcggcggaagaggaggattgggattacgctcctcttgtattggcaccagatgaccgctcatacaaaagccagtacctcaacaacggaccgcagagaattggccggaagtataagaaagtgcgatttatggcctatacagacgaaacctttaagacaagggaggccatccagcatgagagtgggattttgggacctcttctttacggcgaagttggtgataccctcctcatcatcttcaagaatcaagcttctcgcccctataacatttacccacacgggatcactgacgttaggcctttgtatagcagaagacttcccaaaggcgtgaagcatctcaaagacttccccattttgccaggcgagatctttaagtacaaatggaccgtcacagtggaagatggaccgactaaatcagaccctcgatgccttacgcggtactattcctccttcgtgaatatggagagagatttggcaagcggactcataggaccactcctcatctgttacaaggaatctgtagaccagaggggtaaccagattatgagtgataaacgcaatgtgatcctttttagcgtcttcgacgagaaccggtcctggtacttgaccgagaatatacaaaggttccttcccaaccccgcaggcgttcagttggaagaccctgagtttcaggccagcaatattatgcactcaatcaacggctatgtgtttgatagtctccagctttctgtttgcctccatgaagtagcctattggtacatcttgtcaattggtgctcaaacagacttcctctccgtcttcttctccggctacacctttaagcacaagatggtgtatgaggacactctcacactctttccattttctggagaaaccgtgttcatgagcatggagaatccaggcctttggatcttgggttgccacaacagtgattttcgcaatcggggaatgactgctctcctcaaagtcagcagctgtgataagaacacaggcgactattacgaagattcttacgaggacataagtgcctacttgttgtccaagaataacgccattgagcccagatcattctcccagaatcctcccgtgcttaaaaggcatcagcgcgaaatcaccagaactactcttcagtctgatcaagaggagattgactatgacgacaccataagcgtggaaatgaagaaggaggatttcgatatctatgacgaagatgagaaccagtctccgcggagctttcagaagaagacgcgacactacttcattgcagcagtcgaaaggctttgggactacggtatgtcatcatcccctcatgtgttgcgcaatagagctcagagtggaagtgttccacagttcaagaaagtcgtctttcaagagtttacagatggcagcttcacacagcctctctatcggggcgagcttaacgaacatttgggactccttggtccctatatccgagccgaagtggaggacaacattatggttacctttaggaatcaagcctctcgcccctacagcttctactcctccctcatcagttatgaggaggatcagagacaaggcgctgaaccacggaagaactttgtgaaaccgaatgagacgaagacctacttctggaaagtacagcaccacatggcccccacaaaagacgaattcgattgcaaagcatgggcgtatttttcagacgttgacttggagaaagatgtacattcaggacttattggtcctttgttggtgtgtcacactaacactctcaatccagcccatggcaggcaggtgacagtccaggaattcgctcttttctttaccatctttgatgagaccaagtcctggtacttcacggaaaacatggagcgcaattgcagagccccctgtaacatacagatggaggaccctacctttaaggaaaattatcggttccacgcaatcaacggatacattatggatacactccctggccttgtgatggctcaggaccaacgaatcaggtggtacctcctcagcatgggttctaatgagaacatacactccattcacttttcaggacatgtgttcactgtccggaagaaagaagagtataagatggccctctacaatttgtatccaggcgtgtttgagaccgttgaaatgcttccctctaaagctggcatctggagagtagagtgcttgatcggagaacatcttcacgcaggtatgagcaccttgttcctcgtgtacagcaacaaatgtcagaccccacttggcatggccagtggacacattcgcgactttcagatcacagcatctggccagtatggacaatgggccccaaagttggctcgcctccattactccggtagcataaatgcgtggtccactaaagaacctttcagctggattaaggtcgatcttcttgcccccatgatcatccacggcattaagacacagggagcgaggcagaaattctcctccctctacatctcacagttcattattatgtatagtttggacggcaagaagtggcaaacttatagaggtaacagtactggaacactcatggtgttcttcggcaacgttgatagctctggcatcaaacacaacatctttaatcctcccataatagctcggtacatcagattgcatccgacccactacagcattaggagtacactccgaatggagcttatgggttgcgacttgaattcctgttcaatgccactcggaatggagtctaaagccatctctgatgcacagataaccgccagtagctactttacgaacatgtttgctacgtggtcaccctctaaggcaaggcttcatttgcaaggccggtctaatgcctggagacctcaggtgaacaacccgaaagaatggctccaggtggactttcagaagaccatgaaagtaacaggtgtcactactcagggagttaagtccttgctcaccagcatgtatgtgaaggagttccttatttcctcatcacaagatggccaccagtggaccctcttctttcagaatggtaaggtcaaagtgtttcagggcaatcaagacagcttcacacccgtggtgaacagtcttgatcctccactcttgacacgataccttcgaatccatccacagtcttgggttcaccagattgcattgcgcatggaagtacttggatgcgaggctcaggacctctac

SEQ ID NO: 2706 - protein, 1457 aa, synthetic construct
  REGION 1..1457: note = Variant of human B-domain deleted Factor VIII
MQIELSTCFFLCLLRFCFSATRRYYLGAVELSWDYMQSDLGELPVDARFPPRVPKSFPFNTSYVYKKTLFVEFTDHLFNIAKPRPPWMGLLGPTIQAEVYDTVVITLKNMASHPVSLHAVGVSYWKASEGAEYDDQTSQREKEDDKVFPGGSHTYVWQVLKENGPMASDPLCLTYSYLSHVDLVKDLNSGLIGALLVCREGSLAKEKTQTLHKFILLFAVFDEGKSWHSETKNSLMQDRDAASARAWPKMHTVNGYVNRSLPGLIGCHRKSVYWHVIGMGTTPEVHSIFLEGHTFLVRNHRQASLEISPITFLTAQTLLMDLGQFLLFCHISSHQHDGMEAYVKVDSCPEEPQLRMKNNEEAEDYDDDLTDSEMDVVRFDDDNSPSFIQIRSVAKKHPKTWVHYIAAEEEDWDYAPLVLAPDDRSYKSQYLNNGPQRIGRKYKKVRFMAYTDETFKTREAIQHESGILGPLLYGEVGDTLLIIFKNQASRPYNIYPHGITDVRPLYSRRLPKGVKHLKDFPILPGEIFKYKWTVTVEDGPTKSDPRCLTRYYSSFVNMERDLASGLIGPLLICYKESVDQRGNQIMSDKRNVILFSVFDENRSWYLTENIQRFLPNPAGVQLEDPEFQASNIMHSINGYVFDSLQLSVCLHEVAYWYILSIGAQTDFLSVFFSGYTFKHKMVYEDTLTLFPFSGETVFMSMENPGLWILGCHNSDFRNRGMTALLKVSSCDKNTGDYYEDSYEDISAYLLSKNNAIEPRSFSQNPPVLKRHQREITRTTLQSDQEEIDYDDTISVEMKKEDFDIYDEDENQSPRSFQKKTRHYFIAAVERLWDYGMSSSPHVLRNRAQSGSVPQFKKVVFQEFTDGSFTQPLYRGELNEHLGLLGPYIRAEVEDNIMVTFRNQASRPYSFYSSLISYEEDQRQGAEPRKNFVKPNETKTYFWKVQHHMAPTKDEFDCKAWAYFSDVDLEKDVHSGLIGPLLVCHTNTLNPAHGRQVTVQEFALFFTIFDETKSWYFTENMERNCRAPCNIQMEDPTFKENYRFHAINGYIMDTLPGLVMAQDQRIRWYLLSMGSNENIHSIHFSGHVFTVRKKEEYKMALYNLYPGVFETVEMLPSKAGIWRVECLIGEHLHAGMSTLFLVYSNKCQTPLGMASGHIRDFQITASGQYGQWAPKLARLHYSGSINAWSTKEPFSWIKVDLLAPMIIHGIKTQGARQKFSSLYISQFIIMYSLDGKKWQTYRGNSTGTLMVFFGNVDSSGIKHNIFNPPIIARYIRLHPTHYSIRSTLRMELMGCDLNSCSMPLGMESKAISDAQITASSYFTNMFATWSPSKARLHLQGRSNAWRPQVNNPKEWLQVDFQKTMKVTGVTTQGVKSLLTSMYVKEFLISSSQDGHQWTLFFQNGKVKVFQGNQDSFTPVVNSLDPPLLTRYLRIHPQSWVHQIALRMEVLGCEAQDLY

SEQ ID NO: 2707 - DNA, 4371 bp, synthetic construct
  misc_feature 1..4371: note = Variant of human B-domain deleted Factor VIII
  source 1..4371: mol_type = other DNA
atgcagattgaactgtctacctgcttcttcctctgtttgctgaggttctgctttagcgccactagacggtactaccttggcgctgtggagctgtcctgggactatatgcagagtgatttgggagagcttcccgtcgacgcacgatttcctcctcgcgttccaaagtcatttcccttcaacacaagcacggtgtacaagaagacgctcttcgtcgaattcaccgatcacctgttcaatatcgccaaacccagaccaccatggatgggtcttttggggcctaccatacaagcggaggtgtatgacacagttgttatcactctcaagaacatggcttctcatccggtaagtcttcacgcagtgggcgtgtcctactggaaagcttcagaaggagccgagtatgatgatcagacatcccagagggagaaagaagacgacaaggtatttccaggtgggtctcatacctatgtgtggcaagtgctcaaagagaatggccctatggcaagcgatccgctctgtttgacttacagctacctttcacacgttgacctcgtcaaggacctcaactccgggttgattggagccttgttggtatgcagggaaggatctcttgccaaagagaagacacagaccctccacaagtttatccttctctttgctgtgttcgatgagggcaaaagttggcatagcgaaacgaagaattccctcatgcaggatcgcgacgcagccagcgccagagcttggcccaagatgcacactgtgaacggatatgtcaataggtcacttcctggcttgattgggtgtcatcggaaaagtgtctactggcacgtgatcggaatggggacaacaccagaggtccactccatatttctcgaaggccataccttccttgttcgaaaccacagacaggcatccttggagatctctcccattacctttctcactgcccaaacgctccttatggacttgggtcagttccttctcttctgccatatcagctcacaccagcatgatggtatggaagcttatgtgaaagtcgacagttgtcctgaggagccacagttgcgcatgaagaataatgaagaagccgaggattacgacgacgatctcaccgattctgagatggacgtggtgaggtttgatgacgacaactctccctccttcattcaaatccggagcgtggcgaagaaacaccccaagacttgggtccactatatagcggcggaagaggaggattgggattacgctcctcttgtattggcaccagatgaccgctcatacaaaagccagtacctcaacaacggaccgcagagaattggccggaagtataagaaagtgcgatttatggcctatacagacgaaacctttaagacaagggaggccatccagcatgagagtgggattttgggacctcttctttacggcgaagttggtgataccctcctcatcatcttcaagaatcaagcttctcgcccctataacatttacccacacgggatcactgacgttaggcctttgtatagcagaagacttcccaaaggcgtgaagcatctcaaagacttccccattttgccaggcgagatctttaagtacaaatggaccgtcacagtggaagatggaccgactaaatcagaccctcgatgccttacgcggtactattcctccttcgtgaatatggagagagatttggcaagcggactcataggaccactcctcatctgttacaaggaatctgtagaccagaggggtaaccagattatgagtgataaacgcaatgtgatcctttttagcgtcttcgacgagaaccggtcctggtacttgaccgagaatatacaaaggttccttcccaaccccgcaggcgttcagttggaagaccctgagtttcaggccagcaatattatgcactcaatcaacggctatgtgtttgatagtctccagctttctgtttgcctccatgaagtagcctattggtacatcttgtcaattggtgctcaaacagacttcctctccgtcttcttctccggctacacctttaagcacaagatggtgtatgaggacactctcacactctttccattttctggagaaaccgtgttcatgagcatggagaatccaggcctttggatcttgggttgccacaacagtgattttcgcaatcggggaatgactgctctcctcaaagtcagcagctgtgataagaacacaggcgactattacgaagattcttacgaggacataagtgcctacttgttgtccaagaataacgccattgagcccagatcattctcccagaatcctcccgtgcttaaaaggcatcagcgcgaaatcaccagaactactcttcagtctgatcaagaggagattgactatgacgacaccataagcgtggaaatgaagaaggaggatttcgatatctatgacgaagatgagaaccagtctccgcggagctttcagaagaagacgcgacactacttcattgcagcagtcgaaaggctttgggactacggtatgtcatcatcccctcatgtgttgcgcaatagagctcagagtggaagtgttccacagttcaagaaagtcgtctttcaagagtttacagatggcagcttcacacagcctctctatcggggcgagcttaacgaacatttgggactccttggtccctatatccgagccgaagtggaggacaacattatggttacctttaggaatcaagcctctcgcccctacagcttctactcctccctcatcagttatgaggaggatcagagacaaggcgctgaaccacggaagaactttgtgaaaccgaatgagacgaagacctacttctggaaagtacagcaccacatggcccccacaaaagacgaattcgattgcaaagcatgggcgtatttttcagacgttgacttggagaaagatgtacattcaggacttattggtcctttgttggtgtgtcacactaacactctcaatccagcccatggcaggcaggtgacagtccaggaattcgctcttttctttaccatctttgatgagaccaagtcctggtacttcacggaaaacatggagcgcaattgcagagccccctgtaacatacagatggaggaccctacctttaaggaaaattatcggttccacgcaatcaacggatacattatggatacactccctggccttgtgatggctcaggaccaacgaatcaggtggtacctcctcagcatgggttctaatgagaacatacactccattcacttttcaggacatgtgttcactgtccggaagaaagaagagtataagatggccctctacaatttgtatccaggcgtgtttgagaccgttgaaatgcttccctctaaagctggcatctggagagtagagtgcttgatcggagaacatcttcacgcaggtatgagcaccttgttcctcgtgtacagcaacaaatgtcagaccccacttggcatggccagtggacacattcgcgactttcagatcacagcatctggccagtatggacaatgggccccaaagttggctcgcctccattactccggtagcataaatgcgtggtccactaaagaacctttcagctggattaaggtcgatcttcttgcccccatgatcatccacggcattaagacacagggagcgaggcagaaattctcctccctctacatctcacagttcattattatgtatagtttggacggcaagaagtggcaaacttatagaggtaacagtactggaacactcatggtgttcttcggcaacgttgatagctctggcatcaaacacaacatctttaatcctcccataatagctcggtacatcagattgcatccgacccactacagcattaggagtacactccgaatggagcttatgggttgcgacttgaattcctgttcaatgccactcggaatggagtctaaagccatctctgatgcacagataaccgccagtagctactttacgaacatgtttgctacgtggtcaccctctaaggcaaggcttcatttgcaaggccggtctaatgcctggagacctcaggtgaacaacccgaaagaatggctccaggtggactttcagaagaccatgaaagtaacaggtgtcactactcagggagttaagtccttgctcaccagcatgtatgtgaaggagttccttatttcctcatcacaagatggccaccagtggaccctcttctttcagaatggtaaggtcaaagtgtttcagggcaatcaagacagcttcacacccgtggtgaacagtcttgatcctccactcttgacacgataccttcgaatccatccacagtcttgggttcaccagattgcattgcgcatggaagtacttggatgcgaggctcaggacctctac

SEQ ID NO: 2708 - protein, 1457 aa, synthetic construct
  REGION 1..1457: note = Variant of human B-domain deleted Factor VIII
MQIELSTCFFLCLLRFCFSATRRYYLGAVELSWDYMQSDLGELPVDARFPPRVPKSFPFNTSTVYKKTLFVEFTDHLFNIAKPRPPWMGLLGPTIQAEVYDTVVITLKNMASHPVSLHAVGVSYWKASEGAEYDDQTSQREKEDDKVFPGGSHTYVWQVLKENGPMASDPLCLTYSYLSHVDLVKDLNSGLIGALLVCREGSLAKEKTQTLHKFILLFAVFDEGKSWHSETKNSLMQDRDAASARAWPKMHTVNGYVNRSLPGLIGCHRKSVYWHVIGMGTTPEVHSIFLEGHTFLVRNHRQASLEISPITFLTAQTLLMDLGQFLLFCHISSHQHDGMEAYVKVDSCPEEPQLRMKNNEEAEDYDDDLTDSEMDVVRFDDDNSPSFIQIRSVAKKHPKTWVHYIAAEEEDWDYAPLVLAPDDRSYKSQYLNNGPQRIGRKYKKVRFMAYTDETFKTREAIQHESGILGPLLYGEVGDTLLIIFKNQASRPYNIYPHGITDVRPLYSRRLPKGVKHLKDFPILPGEIFKYKWTVTVEDGPTKSDPRCLTRYYSSFVNMERDLASGLIGPLLICYKESVDQRGNQIMSDKRNVILFSVFDENRSWYLTENIQRFLPNPAGVQLEDPEFQASNIMHSINGYVFDSLQLSVCLHEVAYWYILSIGAQTDFLSVFFSGYTFKHKMVYEDTLTLFPFSGETVFMSMENPGLWILGCHNSDFRNRGMTALLKVSSCDKNTGDYYEDSYEDISAYLLSKNNAIEPRSFSQNPPVLKRHQREITRTTLQSDQEEIDYDDTISVEMKKEDFDIYDEDENQSPRSFQKKTRHYFIAAVERLWDYGMSSSPHVLRNRAQSGSVPQFKKVVFQEFTDGSFTQPLYRGELNEHLGLLGPYIRAEVEDNIMVTFRNQASRPYSFYSSLISYEEDQRQGAEPRKNFVKPNETKTYFWKVQHHMAPTKDEFDCKAWAYFSDVDLEKDVHSGLIGPLLVCHTNTLNPAHGRQVTVQEFALFFTIFDETKSWYFTENMERNCRAPCNIQMEDPTFKENYRFHAINGYIMDTLPGLVMAQDQRIRWYLLSMGSNENIHSIHFSGHVFTVRKKEEYKMALYNLYPGVFETVEMLPSKAGIWRVECLIGEHLHAGMSTLFLVYSNKCQTPLGMASGHIRDFQITASGQYGQWAPKLARLHYSGSINAWSTKEPFSWIKVDLLAPMIIHGIKTQGARQKFSSLYISQFIIMYSLDGKKWQTYRGNSTGTLMVFFGNVDSSGIKHNIFNPPIIARYIRLHPTHYSIRSTLRMELMGCDLNSCSMPLGMESKAISDAQITASSYFTNMFATWSPSKARLHLQGRSNAWRPQVNNPKEWLQVDFQKTMKVTGVTTQGVKSLLTSMYVKEFLISSSQDGHQWTLFFQNGKVKVFQGNQDSFTPVVNSLDPPLLTRYLRIHPQSWVHQIALRMEVLGCEAQDLY

SEQ ID NO: 2709 - DNA, 4371 bp, synthetic construct
  misc_feature 1..4371: note = Variant of human B-domain deleted Factor VIII
  source 1..4371: mol_type = other DNA
atgcagattgaactgtctacctgcttcttcctctgtttgctgaggttctgctttagcgccactagacggtactaccttggcgctgtggagctgtcctgggactatatgcagagtgatttgggagagcttcccgtcgacgcacgatttcctcctcgcgttccaaagtcatttcccttcaacacaagcgtggtgtacaagaagacgctcttcgtcgaattcaccgatcacctgttcaatatcgccaaacccagaccaccatggatgggtcttttggggcctaccatacaagcggaggtgtatgacacagttgttatcactctcaagaacatggcttctcatccggtaagtcttcacgcagtgggcgtgtcctactggaaagcttcagaaggagccgagtatgatgatcagacatcccagagggagaaagaagacgacaaggtatttccaggtgggtctcatacctatgtgtggcaagtgctcaaagagaatggccctatggcaagcgatccgctctgtttgacttacagctacctttcacacgttgacctcgtcaaggacctcaactccgggttgattggagccttgttggtatgcagggaaggatctcttgccaaagagaagacacagaccctccacaagtttatccttctctttgctgtgttcgatgagggcaaaagttggcatagcgaaacgaagaattccctcatgcaggatcgcgacgcagccagcgccagagcttggcccaagatgcacactgtgaacggatatgtcaataggtcacttcctggcttgattgggtgtcatcggaaaagtgtctactggcacgtgatcggaatggggacaacaccagaggtccactccatatttctcgaaggccataccttccttgttcgaaaccacagacaggcatccttggagatctctcccattacctttctcactgcccaaacgctccttatggacttgggtcagttccttctcttctgccatatcagctcacaccagcatgatggtatggaagcttatgtgaaagtcgacagttgtcctgaggagccacagttgcgcatgaagaataatgaagaagccgaggattacgacgacgatctcaccgattctgagatggacgtggtgaggtttgatgacgacaactctccctccttcattcaaatccggagcgtggcgaagaaacaccccaagacttgggtccactatatagcggcggaagaggaggattgggattacgctcctcttgtattggcaccagatgaccgctcatacaaaagccagtacctcaacaacggaccgcagagaattggccggaagtataagaaagtgcgatttatggcctatacagacgaaacctttaagacaagggaggccatccagcatgagagtgggattttgggacctcttctttacggcgaagttggtgataccctcctcatcatcttcaagaatcaagcttctcgcccctataacatttacccacacgggatcactgacgttaggcctttgtatagcagaagacttcccaaaggcgtgaagcatctcaaagacttccccattttgccaggcgagatctttaagtacaaatggaccgtcacagtggaagatggaccgactaaatcagaccctcgatgccttacgcggtactattcctccttcgtgaatatggagagagatttggcaagcggactcataggaccactcctcatctgttacaaggaatctgtagaccagaggggtaaccagattatgagtgataaacgcaatgtgatcctttttagcgtcttcgacgagaaccggtcctggtacttgaccgagaatatacaaaggttccttcccaaccccgcaggcgttcagttggaagaccctgagtttcaggccagcaatattatgcactcaatcaacggctatgtgtttgatagtctccagctttctgtttgcctccatgaagtagcctattggtacatcttgtcaattggtgctcaaacagacttcctctccgtcttcttctccggctacacctttaagcacaagatggtgtatgaggacactctcacactctttccattttctggagaaaccgtgttcatgagcatggagaatccaggcctttggatcttgggttgccacaacagtgattttcgcaatcggggaatgactgctctcctcaaagtcagcagctgtgataagaacacaggcgactattacgaagattcttacgaggacataagtgcctacggtttgtccaagaataacgccattgagcccagatcattctcccagaatcctcccgtgcttaaaaggcatcagcgcgaaatcaccagaactactcttcagtctgatcaagaggagattgactatgacgacaccataagcgtggaaatgaagaaggaggatttcgatatctatgacgaagatgagaaccagtctccgcggagctttcagaagaagacgcgacactacttcattgcagcagtcgaaaggctttgggactacggtatgtcatcatcccctcatgtgttgcgcaatagagctcagagtggaagtgttccacagttcaagaaagtcgtctttcaagagtttacagatggcagcttcacacagcctctctatcggggcgagcttaacgaacatttgggactccttggtccctatatccgagccgaagtggaggacaacattatggttacctttaggaatcaagcctctcgcccctacagcttctactcctccctcatcagttatgaggaggatcagagacaaggcgctgaaccacggaagaactttgtgaaaccgaatgagacgaagacctacttctggaaagtacagcaccacatggcccccacaaaagacgaattcgattgcaaagcatgggcgtatttttcagacgttgacttggagaaagatgtacattcaggacttattggtcctttgttggtgtgtcacactaacactctcaatccagcccatggcaggcaggtgacagtccaggaattcgctcttttctttaccatctttgatgagaccaagtcctggtacttcacggaaaacatggagcgcaattgcagagccccctgtaacatacagatggaggaccctacctttaaggaaaattatcggttccacgcaatcaacggatacattatggatacactccctggccttgtgatggctcaggaccaacgaatcaggtggtacctcctcagcatgggttctaatgagaacatacactccattcacttttcaggacatgtgttcactgtccggaagaaagaagagtataagatggccctctacaatttgtatccaggcgtgtttgagaccgttgaaatgcttccctctaaagctggcatctggagagtagagtgcttgatcggagaacatcttcacgcaggtatgagcaccttgttcctcgtgtacagcaacaaatgtcagaccccacttggcatggccagtggacacattcgcgactttcagatcacagcatctggccagtatggacaatgggccccaaagttggctcgcctccattactccggtagcataaatgcgtggtccactaaagaacctttcagctggattaaggtcgatcttcttgcccccatgatcatccacggcattaagacacagggagcgaggcagaaattctcctccctctacatctcacagttcattattatgtatagtttggacggcaagaagtggcaaacttatagaggtaacagtactggaacactcatggtgttcttcggcaacgttgatagctctggcatcaaacacaacatctttaatcctcccataatagctcggtacatcagattgcatccgacccactacagcattaggagtacactccgaatggagcttatgggttgcgacttgaattcctgttcaatgccactcggaatggagtctaaagccatctctgatgcacagataaccgccagtagctactttacgaacatgtttgctacgtggtcaccctctaaggcaaggcttcatttgcaaggccggtctaatgcctggagacctcaggtgaacaacccgaaagaatggctccaggtggactttcagaagaccatgaaagtaacaggtgtcactactcagggagttaagtccttgctcaccagcatgtatgtgaaggagttccttatttcctcatcacaagatggccaccagtggaccctcttctttcagaatggtaaggtcaaagtgtttcagggcaatcaagacagcttcacacccgtggtgaacagtcttgatcctccactcttgacacgataccttcgaatccatccacagtcttgggttcaccagattgcattgcgcatggaagtacttggatgcgaggctcaggacctctac

SEQ ID NO: 2710 - protein, 1457 aa, synthetic construct
  REGION 1..1457: note = Variant of human B-domain deleted Factor VIII
MQIELSTCFFLCLLRFCFSATRRYYLGAVELSWDYMQSDLGELPVDARFPPRVPKSFPFNTSVVYKKTLFVEFTDHLFNIAKPRPPWMGLLGPTIQAEVYDTVVITLKNMASHPVSLHAVGVSYWKASEGAEYDDQTSQREKEDDKVFPGGSHTYVWQVLKENGPMASDPLCLTYSYLSHVDLVKDLNSGLIGALLVCREGSLAKEKTQTLHKFILLFAVFDEGKSWHSETKNSLMQDRDAASARAWPKMHTVNGYVNRSLPGLIGCHRKSVYWHVIGMGTTPEVHSIFLEGHTFLVRNHRQASLEISPITFLTAQTLLMDLGQFLLFCHISSHQHDGMEAYVKVDSCPEEPQLRMKNNEEAEDYDDDLTDSEMDVVRFDDDNSPSFIQIRSVAKKHPKTWVHYIAAEEEDWDYAPLVLAPDDRSYKSQYLNNGPQRIGRKYKKVRFMAYTDETFKTREAIQHESGILGPLLYGEVGDTLLIIFKNQASRPYNIYPHGITDVRPLYSRRLPKGVKHLKDFPILPGEIFKYKWTVTVEDGPTKSDPRCLTRYYSSFVNMERDLASGLIGPLLICYKESVDQRGNQIMSDKRNVILFSVFDENRSWYLTENIQRFLPNPAGVQLEDPEFQASNIMHSINGYVFDSLQLSVCLHEVAYWYILSIGAQTDFLSVFFSGYTFKHKMVYEDTLTLFPFSGETVFMSMENPGLWILGCHNSDFRNRGMTALLKVSSCDKNTGDYYEDSYEDISAYGLSKNNAIEPRSFSQNPPVLKRHQREITRTTLQSDQEEIDYDDTISVEMKKEDFDIYDEDENQSPRSFQKKTRHYFIAAVERLWDYGMSSSPHVLRNRAQSGSVPQFKKVVFQEFTDGSFTQPLYRGELNEHLGLLGPYIRAEVEDNIMVTFRNQASRPYSFYSSLISYEEDQRQGAEPRKNFVKPNETKTYFWKVQHHMAPTKDEFDCKAWAYFSDVDLEKDVHSGLIGPLLVCHTNTLNPAHGRQVTVQEFALFFTIFDETKSWYFTENMERNCRAPCNIQMEDPTFKENYRFHAINGYIMDTLPGLVMAQDQRIRWYLLSMGSNENIHSIHFSGHVFTVRKKEEYKMALYNLYPGVFETVEMLPSKAGIWRVECLIGEHLHAGMSTLFLVYSNKCQTPLGMASGHIRDFQITASGQYGQWAPKLARLHYSGSINAWSTKEPFSWIKVDLLAPMIIHGIKTQGARQKFSSLYISQFIIMYSLDGKKWQTYRGNSTGTLMVFFGNVDSSGIKHNIFNPPIIARYIRLHPTHYSIRSTLRMELMGCDLNSCSMPLGMESKAISDAQITASSYFTNMFATWSPSKARLHLQGRSNAWRPQVNNPKEWLQVDFQKTMKVTGVTTQGVKSLLTSMYVKEFLISSSQDGHQWTLFFQNGKVKVFQGNQDSFTPVVNSLDPPLLTRYLRIHPQSWVHQIALRMEVLGCEAQDLY

SEQ ID NO: 2711 - DNA, 4371 bp, synthetic construct
  misc_feature 1..4371: note = Variant of human B-domain deleted Factor VIII
  source 1..4371: mol_type = other DNA
atgcagattgaactgtctacctgcttcttcctctgtttgctgaggttctgctttagcgccactagacggtactaccttggcgctgtggagctgtcctgggactatatgcagagtgatttgggagagcttcccgtcgacgcacgatttcctcctcgcgttccaaagtcatttcccttcaacacaagcgtggtgtacaagaagacgctcttcgtcgaattcaccgatcacctgttcaatatcgccaaacccagaccaccatggatgggtcttttggggcctaccatacaagcggaggtgtatgacacagttgttatcactctcaagaacatggcttctcatccggtaagtcttcacgcagtgggcgtgtcctactggaaagcttcagaaggagccgagtatgatgatcagacatcccagagggagaaagaagacgacaaggtatttccaggtgggtctcatacctatgtgtggcaagtgctcaaagagaatggccctatggcaagcgatccgctctgtttgacttacagctacctttcacacgttgacctcgtcaaggacctcaactccgggttgattggagccttgttggtatgcagggaaggatctcttgccaaagagaagacacagaccctccacaagtttatccttctctttgctgtgttcgatgagggcaaaagttggcatagcgaaacgaagaattccctcatgcaggatcgcgacgcagccagcgccagagcttggcccaagatgcacactgtgaacggatatgtcaataggtcacttcctggcttgattgggtgtcatcggaaaagtgtctactggcacgtgatcggaatggggacaacaccagaggtccactccatatttctcgaaggccataccttccttgttcgaaaccacagacaggcatccttggagatctctcccattacctttctcactgcccaaacgctccttatggacttgggtcagttccttctcttctgccatatcagctcacaccagcatgatggtatggaagcttatgtgaaagtcgacagttgtcctgaggagccacagttgcgcatgaagaataatgaagaagccgaggattacgacgacgatctcaccgattctgagatggacgtggtgaggtttgatgacgacaactctccctccttcattcaaatccggagcgtggcgaagaaacaccccaagacttgggtccactatatagcggcggaagaggaggattgggattacgctcctcttgtattggcaccagatgaccgctcatacaaaagccagtacctcaacaacggaccgcagagaattggccggaagtataagaaagtgcgatttatggcctatacagacgaaacctttaagacaagggaggccatccagcatgagagtgggattttgggacctcttctttacggcgaagttggtgataccctcctcatcatcttcaagaatcaagcttctcgcccctataacatttacccacacgggatcactgacgttaggcctttgtatagcagaagacttcccaaaggcgtgaagcatctcaaagacttccccattttgccaggcgagatctttaagtacaaatggaccgtcacagtggaagatggaccgactaaatcagaccctcgatgccttacgcggtactattcctccttcgtgaatatggagagagatttggcaagcggactcataggaccactcctcatctgttacaaggaatctgtagaccagaggggtaaccagattatgagtgataaacgcaatgtgatcctttttagcgtcttcgacgagaaccggtcctggtacttgaccgagaatatacaaaggttccttcccaaccccgcaggcgttcagttggaagaccctgagtttcaggccagcaatattatgcactcaatcaacggctatgtgtttgatagtctccagctttctgtttgcctccatgaagtagcctattggtacatcttgtcaattggtgctcaaacagacttcctctccgtcttcttctccggctacacctttaagcacaagatggtgtatgaggacactctcacactctttccattttctggagaaaccgtgttcatgagcatggagaatccaggcctttggatcttgggttgccacaacagtgattttcgcaatcggggaatgactgctctcctcaaagtcagcagctgtgataagaacacaggcgactattacgaagattcttacgaggacataagtgcctacttgttgtccaagaataacgccattgagcccagatcattctcccagaatcctcccgtgcttaaaaggcatcagcgcgaagggaccagaactactcttcagtctgatcaagaggagattgactatgacgacaccataagcgtggaaatgaagaaggaggatttcgatatctatgacgaagatgagaaccagtctccgcggagctttcagaagaagacgcgacactacttcattgcagcagtcgaaaggctttgggactacggtatgtcatcatcccctcatgtgttgcgcaatagagctcagagtggaagtgttccacagttcaagaaagtcgtctttcaagagtttacagatggcagcttcacacagcctctctatcggggcgagcttaacgaacatttgggactccttggtccctatatccgagccgaagtggaggacaacattatggttacctttaggaatcaagcctctcgcccctacagcttctactcctccctcatcagttatgaggaggatcagagacaaggcgctgaaccacggaagaactttgtgaaaccgaatgagacgaagacctacttctggaaagtacagcaccacatggcccccacaaaagacgaattcgattgcaaagcatgggcgtatttttcagacgttgacttggagaaagatgtacattcaggacttattggtcctttgttggtgtgtcacactaacactctcaatccagcccatggcaggcaggtgacagtccaggaattcgctcttttctttaccatctttgatgagaccaagtcctggtacttcacggaaaacatggagcgcaattgcagagccccctgtaacatacagatggaggaccctacctttaaggaaaattatcggttccacgcaatcaacggatacattatggatacactccctggccttgtgatggctcaggaccaacgaatcaggtggtacctcctcagcatgggttctaatgagaacatacactccattcacttttcaggacatgtgttcactgtccggaagaaagaagagtataagatggccctctacaatttgtatccaggcgtgtttgagaccgttgaaatgcttccctctaaagctggcatctggagagtagagtgcttgatcggagaacatcttcacgcaggtatgagcaccttgttcctcgtgtacagcaacaaatgtcagaccccacttggcatggccagtggacacattcgcgactttcagatcacagcatctggccagtatggacaatgggccccaaagttggctcgcctccattactccggtagcataaatgcgtggtccactaaagaacctttcagctggattaaggtcgatcttcttgcccccatgatcatccacggcattaagacacagggagcgaggcagaaattctcctccctctacatctcacagttcattattatgtatagtttggacggcaagaagtggcaaacttatagaggtaacagtactggaacactcatggtgttcttcggcaacgttgatagctctggcatcaaacacaacatctttaatcctcccataatagctcggtacatcagattgcatccgacccactacagcattaggagtacactccgaatggagcttatgggttgcgacttgaattcctgttcaatgccactcggaatggagtctaaagccatctctgatgcacagataaccgccagtagctactttacgaacatgtttgctacgtggtcaccctctaaggcaaggcttcatttgcaaggccggtctaatgcctggagacctcaggtgaacaacccgaaagaatggctccaggtggactttcagaagaccatgaaagtaacaggtgtcactactcagggagttaagtccttgctcaccagcatgtatgtgaaggagttccttatttcctcatcacaagatggccaccagtggaccctcttctttcagaatggtaaggtcaaagtgtttcagggcaatcaagacagcttcacacccgtggtgaacagtcttgatcctccactcttgacacgataccttcgaatccatccacagtcttgggttcaccagattgcattgcgcatggaagtacttggatgcgaggctcaggacctctac

SEQ ID NO: 2712 - protein, 1457 aa, synthetic construct
  REGION 1..1457: note = Variant of human B-domain deleted Factor VIII
MQIELSTCFFLCLLRFCFSATRRYYLGAVELSWDYMQSDLGELPVDARFPPRVPKSFPFNTSVVYKKTLFVEFTDHLFNIAKPRPPWMGLLGPTIQAEVYDTVVITLKNMASHPVSLHAVGVSYWKASEGAEYDDQTSQREKEDDKVFPGGSHTYVWQVLKENGPMASDPLCLTYSYLSHVDLVKDLNSGLIGALLVCREGSLAKEKTQTLHKFILLFAVFDEGKSWHSETKNSLMQDRDAASARAWPKMHTVNGYVNRSLPGLIGCHRKSVYWHVIGMGTTPEVHSIFLEGHTFLVRNHRQASLEISPITFLTAQTLLMDLGQFLLFCHISSHQHDGMEAYVKVDSCPEEPQLRMKNNEEAEDYDDDLTDSEMDVVRFDDDNSPSFIQIRSVAKKHPKTWVHYIAAEEEDWDYAPLVLAPDDRSYKSQYLNNGPQRIGRKYKKVRFMAYTDETFKTREAIQHESGILGPLLYGEVGDTLLIIFKNQASRPYNIYPHGITDVRPLYSRRLPKGVKHLKDFPILPGEIFKYKWTVTVEDGPTKSDPRCLTRYYSSFVNMERDLASGLIGPLLICYKESVDQRGNQIMSDKRNVILFSVFDENRSWYLTENIQRFLPNPAGVQLEDPEFQASNIMHSINGYVFDSLQLSVCLHEVAYWYILSIGAQTDFLSVFFSGYTFKHKMVYEDTLTLFPFSGETVFMSMENPGLWILGCHNSDFRNRGMTALLKVSSCDKNTGDYYEDSYEDISAYLLSKNNAIEPRSFSQNPPVLKRHQREGTRTTLQSDQEEIDYDDTISVEMKKEDFDIYDEDENQSPRSFQKKTRHYFIAAVERLWDYGMSSSPHVLRNRAQSGSVPQFKKVVFQEFTDGSFTQPLYRGELNEHLGLLGPYIRAEVEDNIMVTFRNQASRPYSFYSSLISYEEDQRQGAEPRKNFVKPNETKTYFWKVQHHMAPTKDEFDCKAWAYFSDVDLEKDVHSGLIGPLLVCHTNTLNPAHGRQVTVQEFALFFTIFDETKSWYFTENMERNCRAPCNIQMEDPTFKENYRFHAINGYIMDTLPGLVMAQDQRIRWYLLSMGSNENIHSIHFSGHVFTVRKKEEYKMALYNLYPGVFETVEMLPSKAGIWRVECLIGEHLHAGMSTLFLVYSNKCQTPLGMASGHIRDFQITASGQYGQWAPKLARLHYSGSINAWSTKEPFSWIKVDLLAPMIIHGIKTQGARQKFSSLYISQFIIMYSLDGKKWQTYRGNSTGTLMVFFGNVDSSGIKHNIFNPPIIARYIRLHPTHYSIRSTLRMELMGCDLNSCSMPLGMESKAISDAQITASSYFTNMFATWSPSKARLHLQGRSNAWRPQVNNPKEWLQVDFQKTMKVTGVTTQGVKSLLTSMYVKEFLISSSQDGHQWTLFFQNGKVKVFQGNQDSFTPVVNSLDPPLLTRYLRIHPQSWVHQIALRMEVLGCEAQDLY

SEQ ID NO: 2713 - DNA, 4371 bp, synthetic construct
  misc_feature 1..4371: note = Variant of human B-domain deleted Factor VIII
  source 1..4371: mol_type = other DNA
atgcagattgaactgtctacctgcttcttcctctgtttgctgaggttctgctttagcgccactagacggtactaccttggcgctgtggagctgtcctgggactatatgcagagtgatttgggagagcttcccgtcgacgcacgatttcctcctcgcgttccaaagtcatttcccttcaacacaagcgtggtgtacaagaagacgctcttcgtcgaattcaccgatcacctgttcaatatcgccaaacccagaccaccatggatgggtcttttggggcctaccatacaagcggaggtgtatgacacagttgttatcactctcaagaacatggcttctcatccggtaagtcttcacgcagtgggcgtgtcctactggaaagcttcagaaggagccgagtatgatgatcagacatcccagagggagaaagaagacgacaaggtatttccaggtgggtctcatacctatgtgtggcaagtgctcaaagagaatggccctatggcaagcgatccgctctgtttgacttacagctacctttcacacgttgacctcgtcaaggacctcaactccgggttgattggagccttgttggtatgcagggaaggatctcttgccaaagagaagacacagaccctccacaagtttatccttctctttgctgtgttcgatgagggcaaaagttggcatagcgaaacgaagaattccctcatgcaggatcgcgacgcagccagcgccagagcttggcccaagatgcacactgtgaacggatatgtcaataggtcacttcctggcttgattgggtgtcatcggaaaagtgtctactggcacgtgatcggaatggggacaacaccagaggtccactccatatttctcgaaggccataccttccttgttcgaaaccacagacaggcatccttggagatctctcccattacctttctcactgcccaaacgctccttatggacttgggtcagttccttctcttctgccatatcagctcacaccagcatgatggtatggaagcttatgtgaaagtcgacagttgtcctgaggagccacagttgcgcatgaagaataatgaagaagccgaggattacgacgacgatctcaccgattctgagatggacgtggtgaggtttgatgacgacaactctccctccttcattcaaatccggagcgtggcgaagaaacaccccaagacttgggtccactatatagcggcggaagaggaggattgggattacgctcctcttgtattggcaccagatgaccgctcatacaaaagccagtacctcaacaacggaccgcagagaattggccggaagtataagaaagtgcgatttatggcctatacagacgaaacctttaagacaagggaggccatccagcatgagagtgggattttgggacctcttctttacggcgaagttggtgataccctcctcatcatcttcaagaatcaagcttctcgcccctataacatttacccacacgggatcactgacgttaggcctttgtatagcagaagacttcccaaaggcgtgaagcatctcaaagacttccccattttgccaggcgagatctttaagtacaaatggaccgtcacagtggaagatggaccgactaaatcagaccctcgatgccttacgcggtactattcctccttcgtgaatatggagagagatttggcaagcggactcataggaccactcctcatctgttacaaggaatctgtagaccagaggggtaaccagattatgagtgataaacgcaatgtgatcctttttagcgtcttcgacgagaaccggtcctggtacttgaccgagaatatacaaaggttccttcccaaccccgcaggcgttcagttggaagaccctgagtttcaggccagcaatattatgcactcaatcaacggctatgtgtttgatagtctccagctttctgtttgcctccatgaagtagcctattggtacatcttgtcaattggtgctcaaacagacttcctctccgtcttcttctccggctacacctttaagcacaagatggtgtatgaggacactctcacactctttccattttctggagaaaccgtgttcatgagcatggagaatccaggcctttggatcttgggttgccacaacagtgattttcgcaatcggggaatgactgctctcctcaaagtcagcagctgtgataagaacacaggcgactattacgaagattcttacgaggacataagtgcctacttgttgtccaagaataacgccattgagcccagatcattctcccagaatcctcccgtgcttaaaaggcatcagcgcgaaatcaccagaactactcttcagtctgatcaagaggagattgactatgacgacaccataagcgtggaaatgaagaaggaggatttcgatatctatgacgaagatgagaaccagtctccgcggagctttcagaagaagacgcgacactacttcattgcagcagtcgaaaggctttgggactacggtatgtcatcatcccctcatgtgttgcgcaatagagctcagagtggaagtgttccacagttcaagaaagtcgtctttcaagagtttacagatggcagcttcacacagcctctctatcggggcgagcttaacgaacatttgggactccttggtccctatatccgagccgaagtggaggacaacattatggttacctttaggaatcaagcctctcgcccctacagcttctactcctccctcatcagttatgaggaggatcagagacaaggcgctgaaccacggaagaactttgtgaaaccgaatgagacgaagacctacttctggaaagtacagcaccacatggcccccacaaaagacgaattcgattgcaaagcatgggcgtatttttcagacgttgacttggagaaagatgtacattcaggacttattggtcctttgttggtgtgtcacactaacactctcaatccagcccatggcaggcaggtgacagtccaggaattcgctcttttctttaccatctttgatgagaccaagtcctggtacttcacggaaaacatggagcgcaattgcagagccccctgtaacatacagatggaggaccctacctttaaggaaaattatcggttccacgcaatcaacggatacattatggatacactccctggccttgtgatggctcaggaccaacgaatcaggtggtacctcctcagcatgggttctaatgagaacatacactccattcacttttcaggacatgtgttcactgtccggaagactgaagagtataagatggccctctacaatttgtatccaggcgtgtttgagaccgttgaaatgcttccctctaaagctggcatctggagagtagagtgcttgatcggagaacatcttcacgcaggtatgagcaccttgttcctcgtgtacagcaacaaatgtcagaccccacttggcatggccagtggacacattcgcgactttcagatcacagcatctggccagtatggacaatgggccccaaagttggctcgcctccattactccggtagcataaatgcgtggtccactaaagaacctttcagctggattaaggtcgatcttcttgcccccatgatcatccacggcattaagacacagggagcgaggcagaaattctcctccctctacatctcacagttcattattatgtatagtttggacggcaagaagtggcaaacttatagaggtaacagtactggaacactcatggtgttcttcggcaacgttgatagctctggcatcaaacacaacatctttaatcctcccataatagctcggtacatcagattgcatccgacccactacagcattaggagtacactccgaatggagcttatgggttgcgacttgaattcctgttcaatgccactcggaatggagtctaaagccatctctgatgcacagataaccgccagtagctactttacgaacatgtttgctacgtggtcaccctctaaggcaaggcttcatttgcaaggccggtctaatgcctggagacctcaggtgaacaacccgaaagaatggctccaggtggactttcagaagaccatgaaagtaacaggtgtcactactcagggagttaagtccttgctcaccagcatgtatgtgaaggagttccttatttcctcatcacaagatggccaccagtggaccctcttctttcagaatggtaaggtcaaagtgtttcagggcaatcaagacagcttcacacccgtggtgaacagtcttgatcctccactcttgacacgataccttcgaatccatccacagtcttgggttcaccagattgcattgcgcatggaagtacttggatgcgaggctcaggacctctac

SEQ ID NO: 2714 - protein, 1457 aa, synthetic construct
  REGION 1..1457: note = Variant of human B-domain deleted Factor VIII
MQIELSTCFFLCLLRFCFSATRRYYLGAVELSWDYMQSDLGELPVDARFPPRVPKSFPFNTSVVYKKTLFVEFTDHLFNIAKPRPPWMGLLGPTIQAEVYDTVVITLKNMASHPVSLHAVGVSYWKASEGAEYDDQTSQREKEDDKVFPGGSHTYVWQVLKENGPMASDPLCLTYSYLSHVDLVKDLNSGLIGALLVCREGSLAKEKTQTLHKFILLFAVFDEGKSWHSETKNSLMQDRDAASARAWPKMHTVNGYVNRSLPGLIGCHRKSVYWHVIGMGTTPEVHSIFLEGHTFLVRNHRQASLEISPITFLTAQTLLMDLGQFLLFCHISSHQHDGMEAYVKVDSCPEEPQLRMKNNEEAEDYDDDLTDSEMDVVRFDDDNSPSFIQIRSVAKKHPKTWVHYIAAEEEDWDYAPLVLAPDDRSYKSQYLNNGPQRIGRKYKKVRFMAYTDETFKTREAIQHESGILGPLLYGEVGDTLLIIFKNQASRPYNIYPHGITDVRPLYSRRLPKGVKHLKDFPILPGEIFKYKWTVTVEDGPTKSDPRCLTRYYSSFVNMERDLASGLIGPLLICYKESVDQRGNQIMSDKRNVILFSVFDENRSWYLTENIQRFLPNPAGVQLEDPEFQASNIMHSINGYVFDSLQLSVCLHEVAYWYILSIGAQTDFLSVFFSGYTFKHKMVYEDTLTLFPFSGETVFMSMENPGLWILGCHNSDFRNRGMTALLKVSSCDKNTGDYYEDSYEDISAYLLSKNNAIEPRSFSQNPPVLKRHQREITRTTLQSDQEEIDYDDTISVEMKKEDFDIYDEDENQSPRSFQKKTRHYFIAAVERLWDYGMSSSPHVLRNRAQSGSVPQFKKVVFQEFTDGSFTQPLYRGELNEHLGLLGPYIRAEVEDNIMVTFRNQASRPYSFYSSLISYEEDQRQGAEPRKNFVKPNETKTYFWKVQHHMAPTKDEFDCKAWAYFSDVDLEKDVHSGLIGPLLVCHTNTLNPAHGRQVTVQEFALFFTIFDETKSWYFTENMERNCRAPCNIQMEDPTFKENYRFHAINGYIMDTLPGLVMAQDQRIRWYLLSMGSNENIHSIHFSGHVFTVRKTEEYKMALYNLYPGVFETVEMLPSKAGIWRVECLIGEHLHAGMSTLFLVYSNKCQTPLGMASGHIRDFQITASGQYGQWAPKLARLHYSGSINAWSTKEPFSWIKVDLLAPMIIHGIKTQGARQKFSSLYISQFIIMYSLDGKKWQTYRGNSTGTLMVFFGNVDSSGIKHNIFNPPIIARYIRLHPTHYSIRSTLRMELMGCDLNSCSMPLGMESKAISDAQITASSYFTNMFATWSPSKARLHLQGRSNAWRPQVNNPKEWLQVDFQKTMKVTGVTTQGVKSLLTSMYVKEFLISSSQDGHQWTLFFQNGKVKVFQGNQDSFTPVVNSLDPPLLTRYLRIHPQSWVHQIALRMEVLGCEAQDLY

SEQ ID NO: 2715 - DNA, 4371 bp, synthetic construct
  misc_feature 1..4371: note = Variant of human B-domain deleted Factor VIII
  source 1..4371: mol_type = other DNA
atgcagattgaactgtctacctgcttcttcctctgtttgctgaggttctgctttagcgccactagacggtactaccttggcgctgtggagctgtcctgggactatatgcagagtgatttgggagagcttcccgtcgacgcacgatttcctcctcgcgttccaaagtcatttcccttcaacacaagcgtggtgtacaagaagacgctcttcgtcgaattcaccgatcacctgttcaatatcgccaaacccagaccaccatggatgggtcttttggggcctaccatacaagcggaggtgtatgacacagttgttatcactctcaagaacatggcttctcatccggtaagtcttcacgcagtgggcgtgtcctactggaaagcttcagaaggagccgagtatgatgatcagacatcccagagggagaaagaagacgacaaggtatttccaggtgggtctcatacctatgtgtggcaagtgctcaaagagaatggccctatggcaagcgatccgctctgtttgacttacagctacctttcacacgttgacctcgtcaaggacctcaactccgggttgattggagccttgttggtatgcagggaaggatctcttgccaaagagaagacacagaccctccacaagtttatccttctctttgctgtgttcgatgagggcaaaagttggcatagcgaaacgaagaattccctcatgcaggatcgcgacgcagccagcgccagagcttggcccaagatgcacactgtgaacggatatgtcaataggtcacttcctggcttgattgggtgtcatcggaaaagtgtctactggcacgtgatcggaatggggacaacaccagaggtccactccatatttctcgaaggccataccttccttgttcgaaaccacagacaggcatccttgccgatctctcccattacctttctcactgcccaaacgctccttatggacttgggtcagttccttctcttctgccatatcagctcacaccagcatgatggtatggaagcttatgtgaaagtcgacagttgtcctgaggagccacagttgcgcatgaagaataatgaagaagccgaggattacgacgacgatctcaccgattctgagatggacgtggtgaggtttgatgacgacaactctccctccttcattcaaatccggagcgtggcgaagaaacaccccaagacttgggtccactatatagcggcggaagaggaggattgggattacgctcctcttgtattggcaccagatgaccgctcatacaaaagccagtacctcaacaacggaccgcagagaattggccggaagtataagaaagtgcgatttatggcctatacagacgaaacctttaagacaagggaggccatccagcatgagagtgggattttgggacctcttctttacggcgaagttggtgataccctcctcatcatcttcaagaatcaagcttctcgcccctataacatttacccacacgggatcactgacgttaggcctttgtatagcagaagacttcccaaaggcgtgaagcatctcaaagacttccccattttgccaggcgagatctttaagtacaaatggaccgtcacagtggaagatggaccgactaaatcagaccctcgatgccttacgcggtactattcctccttcgtgaatatggagagagatttggcaagcggactcataggaccactcctcatctgttacaaggaatctgtagaccagaggggtaaccagattatgagtgataaacgcaatgtgatcctttttagcgtcttcgacgagaaccggtcctggtacttgaccgagaatatacaaaggttccttcccaaccccgcaggcgttcagttggaagaccctgagtttcaggccagcaatattatgcactcaatcaacggctatgtgtttgatagtctccagctttctgtttgcctccatgaagtagcctattggtacatcttgtcaattggtgctcaaacagacttcctctccgtcttcttctccggctacacctttaagcacaagatggtgtatgaggacactctcacactctttccattttctggagaaaccgtgttcatgagcatggagaatccaggcctttggatcttgggttgccacaacagtgattttcgcaatcggggaatgactgctctcctcaaagtcagcagctgtgataagaacacaggcgactattacgaagattcttacgaggacataagtgcctacttgttgtccaagaataacgccattgagcccagatcattctcccagaatcctcccgtgcttaaaaggcatcagcgcgaaatcaccagaactactcttcagtctgatcaagaggagattgactatgacgacaccataagcgtggaaatgaagaaggaggatttcgatatctatgacgaagatgagaaccagtctccgcggagctttcagaagaagacgcgacactacttcattgcagcagtcgaaaggctttgggactacggtatgtcatcatcccctcatgtgttgcgcaatagagctcagagtggaagtgttccacagttcaagaaagtcgtctttcaagagtttacagatggcagcttcacacagcctctctatcggggcgagcttaacgaacatttgggactccttggtccctatatccgagccgaagtggaggacaacattatggttacctttaggaatcaagcctctcgcccctacagcttctactcctccctcatcagttatgaggaggatcagagacaaggcgctgaaccacggaagaactttgtgaaaccgaatgagacgaagacctacttctggaaagtacagcaccacatggcccccacaaaagacgaattcgattgcaaagcatgggcgtatttttcagacgttgacttggagaaagatgtacattcaggacttattggtcctttgttggtgtgtcacactaacactctcaatccagcccatggcaggcaggtgacagtccaggaattcgctcttttctttaccatctttgatgagaccaagtcctggtacttcacggaaaacatggagcgcaattgcagagccccctgtaacatacagatggaggaccctacctttaaggaaaattatcggttccacgcaatcaacggatacattatggatacactccctggccttgtgatggctcaggaccaacgaatcaggtggtacctcctcagcatgggttctaatgagaacatacactccattcacttttcaggacatgtgttcactgtccggaagaaagaagagtataagatggccctctacaatttgtatccaggcgtgtttgagaccgttgaaatgcttccctctaaagctggcatctggagagtagagtgcttgatcggagaacatcttcacgcaggtatgagcaccttgttcctcgtgtacagcaacaaatgtcagaccccacttggcatggccagtggacacattcgcgactttcagatcacagcatctggccagtatggacaatgggccccaaagttggctcgcctccattactccggtagcataaatgcgtggtccactaaagaacctttcagctggattaaggtcgatcttcttgcccccatgatcatccacggcattaagacacagggagcgaggcagaaattctcctccctctacatctcacagttcattattatgtatagtttggacggcaagaagtggcaaacttatagaggtaacagtactggaacactcatggtgttcttcggcaacgttgatagctctggcatcaaacacaacatctttaatcctcccataatagctcggtacatcagattgcatccgacccactacagcattaggagtacactccgaatggagcttatgggttgcgacttgaattcctgttcaatgccactcggaatggagtctaaagccatctctgatgcacagataaccgccagtagctactttacgaacatgtttgctacgtggtcaccctctaaggcaaggcttcatttgcaaggccggtctaatgcctggagacctcaggtgaacaacccgaaagaatggctccaggtggactttcagaagaccatgaaagtaacaggtgtcactactcagggagttaagtccttgctcaccagcatgtatgtgaaggagttccttatttcctcatcacaagatggccaccagtggaccctcttctttcagaatggtaaggtcaaagtgtttcagggcaatcaagacagcttcacacccgtggtgaacagtcttgatcctccactcttgacacgataccttcgaatccatccacagtcttgggttcaccagattgcattgcgcatggaagtacttggatgcgaggctcaggacctctac

SEQ ID NO: 2716 - protein, 1457 aa, synthetic construct
  REGION 1..1457: note = Variant of human B-domain deleted Factor VIII
MQIELSTCFFLCLLRFCFSATRRYYLGAVELSWDYMQSDLGELPVDARFPPRVPKSFPFNTSVVYKKTLFVEFTDHLFNIAKPRPPWMGLLGPTIQAEVYDTVVITLKNMASHPVSLHAVGVSYWKASEGAEYDDQTSQREKEDDKVFPGGSHTYVWQVLKENGPMASDPLCLTYSYLSHVDLVKDLNSGLIGALLVCREGSLAKEKTQTLHKFILLFAVFDEGKSWHSETKNSLMQDRDAASARAWPKMHTVNGYVNRSLPGLIGCHRKSVYWHVIGMGTTPEVHSIFLEGHTFLVRNHRQASLPISPITFLTAQTLLMDLGQFLLFCHISSHQHDGMEAYVKVDSCPEEPQLRMKNNEEAEDYDDDLTDSEMDVVRFDDDNSPSFIQIRSVAKKHPKTWVHYIAAEEEDWDYAPLVLAPDDRSYKSQYLNNGPQRIGRKYKKVRFMAYTDETFKTREAIQHESGILGPLLYGEVGDTLLIIFKNQASRPYNIYPHGITDVRPLYSRRLPKGVKHLKDFPILPGEIFKYKWTVTVEDGPTKSDPRCLTRYYSSFVNMERDLASGLIGPLLICYKESVDQRGNQIMSDKRNVILFSVFDENRSWYLTENIQRFLPNPAGVQLEDPEFQASNIMHSINGYVFDSLQLSVCLHEVAYWYILSIGAQTDFLSVFFSGYTFKHKMVYEDTLTLFPFSGETVFMSMENPGLWILGCHNSDFRNRGMTALLKVSSCDKNTGDYYEDSYEDISAYLLSKNNAIEPRSFSQNPPVLKRHQREITRTTLQSDQEEIDYDDTISVEMKKEDFDIYDEDENQSPRSFQKKTRHYFIAAVERLWDYGMSSSPHVLRNRAQSGSVPQFKKVVFQEFTDGSFTQPLYRGELNEHLGLLGPYIRAEVEDNIMVTFRNQASRPYSFYSSLISYEEDQRQGAEPRKNFVKPNETKTYFWKVQHHMAPTKDEFDCKAWAYFSDVDLEKDVHSGLIGPLLVCHTNTLNPAHGRQVTVQEFALFFTIFDETKSWYFTENMERNCRAPCNIQMEDPTFKENYRFHAINGYIMDTLPGLVMAQDQRIRWYLLSMGSNENIHSIHFSGHVFTVRKKEEYKMALYNLYPGVFETVEMLPSKAGIWRVECLIGEHLHAGMSTLFLVYSNKCQTPLGMASGHIRDFQITASGQYGQWAPKLARLHYSGSINAWSTKEPFSWIKVDLLAPMIIHGIKTQGARQKFSSLYISQFIIMYSLDGKKWQTYRGNSTGTLMVFFGNVDSSGIKHNIFNPPIIARYIRLHPTHYSIRSTLRMELMGCDLNSCSMPLGMESKAISDAQITASSYFTNMFATWSPSKARLHLQGRSNAWRPQVNNPKEWLQVDFQKTMKVTGVTTQGVKSLLTSMYVKEFLISSSQDGHQWTLFFQNGKVKVFQGNQDSFTPVVNSLDPPLLTRYLRIHPQSWVHQIALRMEVLGCEAQDLY

SEQ ID NO: 2717 - DNA, 4371 bp, synthetic construct
  misc_feature 1..4371: note = Variant of human B-domain deleted Factor VIII
  source 1..4371: mol_type = other DNA
atgcagattgaactgtctacctgcttcttcctctgtttgctgaggttctgctttagcgccactagacggtactaccttggcgctgtggagctgtcctgggactatatgcagagtgatttgggagagcttcccgtcgacgcacgatttcctcctcgcgttccaaagtcatttcccttcaacacaagcgtggtgtacaagaagacgctcttcgtcgaattcaccgatcacctgttcaatatcgccaaacccagaccaccatggatgggtcttttggggcctaccatacaagcggaggtgtatgacacagttgttatcactctcaagaacatggcttctcatccggtaagtcttcacgcagtgggcgtgtcctactggaaagcttcagaaggagccgagtatgatgatcagacatcccagagggagaaagaagacgacaaggtatttccaggtgggtctcatacctatgtgtggcaagtgctcaaagagaatggccctatggcaagcgatccgctctgtttgacttacagctacctttcacacgttgacctcgtcaaggacctcaactccgggttgattggagccttgttggtatgcagggaaggatctcttgccaaagagaagacacagaccctccacaagtttatccttctctttgctgtgttcgatgagggcaaaagttggcatagcgaaacgaagaattccctcatgcaggatcgcgacgcagccagcgccagagcttggcccaagatgcacactgtgaacggatatgtcaataggtcacttcctggcttgattgggtgtcatcggaaaagtgtctactggcacgtgatcggaatggggacaacaccagaggtccactccatatttctcgaaggccataccttccttgttcgaaaccacagacaggcatccttggagatctctcccattacctttctcactgcccaaacgctccttatggacttgggtcagttccttctcttctgccatatcagctcacaccagcatgatggtatggaagcttatgtgaaagtcgacagttgtcctgaggagccacagttgcgcatgaagaataatgaagaagccgaggattacgacgacgatctcaccgattctgagatggacgtggtgaggtttgatgacgacaactctccctccttcattcaaatccggagcagggcgaagaaacaccccaagacttgggtccactatatagcggcggaagaggaggattgggattacgctcctcttgtattggcaccagatgaccgctcatacaaaagccagtacctcaacaacggaccgcagagaattggccggaagtataagaaagtgcgatttatggcctatacagacgaaacctttaagacaagggaggccatccagcatgagagtgggattttgggacctcttctttacggcgaagttggtgataccctcctcatcatcttcaagaatcaagcttctcgcccctataacatttacccacacgggatcactgacgttaggcctttgtatagcagaagacttcccaaaggcgtgaagcatctcaaagacttccccattttgccaggcgagatctttaagtacaaatggaccgtcacagtggaagatggaccgactaaatcagaccctcgatgccttacgcggtactattcctccttcgtgaatatggagagagatttggcaagcggactcataggaccactcctcatctgttacaaggaatctgtagaccagaggggtaaccagattatgagtgataaacgcaatgtgatcctttttagcgtcttcgacgagaaccggtcctggtacttgaccgagaatatacaaaggttccttcccaaccccgcaggcgttcagttggaagaccctgagtttcaggccagcaatattatgcactcaatcaacggctatgtgtttgatagtctccagctttctgtttgcctccatgaagtagcctattggtacatcttgtcaattggtgctcaaacagacttcctctccgtcttcttctccggctacacctttaagcacaagatggtgtatgaggacactctcacactctttccattttctggagaaaccgtgttcatgagcatggagaatccaggcctttggatcttgggttgccacaacagtgattttcgcaatcggggaatgactgctctcctcaaagtcagcagctgtgataagaacacaggcgactattacgaagattcttacgaggacataagtgcctacttgttgtccaagaataacgccattgagcccagatcattctcccagaatcctcccgtgcttaaaaggcatcagcgcgaaatcaccagaactactcttcagtctgatcaagaggagattgactatgacgacaccataagcgtggaaatgaagaaggaggatttcgatatctatgacgaagatgagaaccagtctccgcggagctttcagaagaagacgcgacactacttcattgcagcagtcgaaaggctttgggactacggtatgtcatcatcccctcatgtgttgcgcaatagagctcagagtggaagtgttccacagttcaagaaagtcgtctttcaagagtttacagatggcagcttcacacagcctctctatcggggcgagcttaacgaacatttgggactccttggtccctatatccgagccgaagtggaggacaacattatggttacctttaggaatcaagcctctcgcccctacagcttctactcctccctcatcagttatgaggaggatcagagacaaggcgctgaaccacggaagaactttgtgaaaccgaatgagacgaagacctacttctggaaagtacagcaccacatggcccccacaaaagacgaattcgattgcaaagcatgggcgtatttttcagacgttgacttggagaaagatgtacattcaggacttattggtcctttgttggtgtgtcacactaacactctcaatccagcccatggcaggcaggtgacagtccaggaattcgctcttttctttaccatctttgatgagaccaagtcctggtacttcacggaaaacatggagcgcaattgcagagccccctgtaacatacagatggaggaccctacctttaaggaaaattatcggttccacgcaatcaacggatacattatggatacactccctggccttgtgatggctcaggaccaacgaatcaggtggtacctcctcagcatgggttctaatgagaacatacactccattcacttttcaggacatgtgttcactgtccggaagaaagaagagtataagatggccctctacaatttgtatccaggcgtgtttgagaccgttgaaatgcttccctctaaagctggcatctggagagtagagtgcttgatcggagaacatcttcacgcaggtatgagcaccttgttcctcgtgtacagcaacaaatgtcagaccccacttggcatggccagtggacacattcgcgactttcagatcacagcatctggccagtatggacaatgggccccaaagttggctcgcctccattactccggtagcataaatgcgtggtccactaaagaacctttcagctggattaaggtcgatcttcttgcccccatgatcatccacggcattaagacacagggagcgaggcagaaattctcctccctctacatctcacagttcattattatgtatagtttggacggcaagaagtggcaaacttatagaggtaacagtactggaacactcatggtgttcttcggcaacgttgatagctctggcatcaaacacaacatctttaatcctcccataatagctcggtacatcagattgcatccgacccactacagcattaggagtacactccgaatggagcttatgggttgcgacttgaattcctgttcaatgccactcggaatggagtctaaagccatctctgatgcacagataaccgccagtagctactttacgaacatgtttgctacgtggtcaccctctaaggcaaggcttcatttgcaaggccggtctaatgcctggagacctcaggtgaacaacccgaaagaatggctccaggtggactttcagaagaccatgaaagtaacaggtgtcactactcagggagttaagtccttgctcaccagcatgtatgtgaaggagttccttatttcctcatcacaagatggccaccagtggaccctcttctttcagaatggtaaggtcaaagtgtttcagggcaatcaagacagcttcacacccgtggtgaacagtcttgatcctccactcttgacacgataccttcgaatccatccacagtcttgggttcaccagattgcattgcgcatggaagtacttggatgcgaggctcaggacctctac

SEQ ID NO: 2718 - protein, 1457 aa, synthetic construct
  REGION 1..1457: note = Variant of human B-domain deleted Factor VIII
MQIELSTCFFLCLLRFCFSATRRYYLGAVELSWDYMQSDLGELPVDARFPPRVPKSFPFNTSVVYKKTLFVEFTDHLFNIAKPRPPWMGLLGPTIQAEVYDTVVITLKNMASHPVSLHAVGVSYWKASEGAEYDDQTSQREKEDDKVFPGGSHTYVWQVLKENGPMASDPLCLTYSYLSHVDLVKDLNSGLIGALLVCREGSLAKEKTQTLHKFILLFAVFDEGKSWHSETKNSLMQDRDAASARAWPKMHTVNGYVNRSLPGLIGCHRKSVYWHVIGMGTTPEVHSIFLEGHTFLVRNHRQASLEISPITFLTAQTLLMDLGQFLLFCHISSHQHDGMEAYVKVDSCPEEPQLRMKNNEEAEDYDDDLTDSEMDVVRFDDDNSPSFIQIRSRAKKHPKTWVHYIAAEEEDWDYAPLVLAPDDRSYKSQYLNNGPQRIGRKYKKVRFMAYTDETFKTREAIQHESGILGPLLYGEVGDTLLIIFKNQASRPYNIYPHGITDVRPLYSRRLPKGVKHLKDFPILPGEIFKYKWTVTVEDGPTKSDPRCLTRYYSSFVNMERDLASGLIGPLLICYKESVDQRGNQIMSDKRNVILFSVFDENRSWYLTENIQRFLPNPAGVQLEDPEFQASNIMHSINGYVFDSLQLSVCLHEVAYWYILSIGAQTDFLSVFFSGYTFKHKMVYEDTLTLFPFSGETVFMSMENPGLWILGCHNSDFRNRGMTALLKVSSCDKNTGDYYEDSYEDISAYLLSKNNAIEPRSFSQNPPVLKRHQREITRTTLQSDQEEIDYDDTISVEMKKEDFDIYDEDENQSPRSFQKKTRHYFIAAVERLWDYGMSSSPHVLRNRAQSGSVPQFKKVVFQEFTDGSFTQPLYRGELNEHLGLLGPYIRAEVEDNIMVTFRNQASRPYSFYSSLISYEEDQRQGAEPRKNFVKPNETKTYFWKVQHHMAPTKDEFDCKAWAYFSDVDLEKDVHSGLIGPLLVCHTNTLNPAHGRQVTVQEFALFFTIFDETKSWYFTENMERNCRAPCNIQMEDPTFKENYRFHAINGYIMDTLPGLVMAQDQRIRWYLLSMGSNENIHSIHFSGHVFTVRKKEEYKMALYNLYPGVFETVEMLPSKAGIWRVECLIGEHLHAGMSTLFLVYSNKCQTPLGMASGHIRDFQITASGQYGQWAPKLARLHYSGSINAWSTKEPFSWIKVDLLAPMIIHGIKTQGARQKFSSLYISQFIIMYSLDGKKWQTYRGNSTGTLMVFFGNVDSSGIKHNIFNPPIIARYIRLHPTHYSIRSTLRMELMGCDLNSCSMPLGMESKAISDAQITASSYFTNMFATWSPSKARLHLQGRSNAWRPQVNNPKEWLQVDFQKTMKVTGVTTQGVKSLLTSMYVKEFLISSSQDGHQWTLFFQNGKVKVFQGNQDSFTPVVNSLDPPLLTRYLRIHPQSWVHQIALRMEVLGCEAQDLY

SEQ ID NO: 2719 - DNA, 4371 bp, synthetic construct
  misc_feature 1..4371: note = Variant of human B-domain deleted Factor VIII
  source 1..4371: mol_type = other DNA
atgcagattgaactgtctacctgcttcttcctctgtttgctgaggttctgctttagcgccactagacggtactaccttggcgctgtggagctgtcctgggactatatgcagagtgatttgggagagcttcccgtcgacgcacgatttcctcctcgcgttccaaagtcatttcccttcaacacaagcgtggtgtacaagaagacgctcttcgtcgaattcaccgatcacctgttcaatatcgccaaacccagaccaccatggatgggtcttttggggcctaccatacaagcggaggtgtatgacacagttgttatcactctcaagaacatggcttctcatccggtaagtcttcacgcagtgggcgtgtcctactggaaagcttcagaaggagccgagtatgatgatcagacatcccagagggagaaagaagacgacaaggtatttccaggtgggtctcatacctatgtgtggcaagtgctcaaagagaatggccctatggcaagcgatccgctctgtttgacttacagctacctttcacacgttgacctcgtcaaggacctcaactccgggttgattggagccttgttggtatgcagggaaggatctcttgccaaagagaagacacagaccctccacaagtttatccttctctttgctgtgttcgatgagggcaaaagttggcatagcgaaacgaagaattccctcatgcaggatcgcgacgcagccagcgccagagcttggcccaagatgcacactgtgaacggatatgtcaataggtcacttcctggcttgattgggtgtcatcggaaaagtgtctactggcacgtgatcggaatggggacaacaccagaggtccactccatatttctcgaaggccataccttccttgttcgaaaccacagacaggcatccttggagatctctcccattacctttctcactgcccaaacgctccttatggacttgggtcagttccttctcttctgccatatcagctcacaccagcatgatggtatggaagcttatgtgaaagtcgacagttgtcctgaggagccacagttgcgcatgaagaataatgaagaagccgaggattacgacgacgatctcaccgattctgagatggacgtggtgaggtttgatgacgacaactctccctccttcattcaaatccggagcgtggcgaagaaacaccccaagacttgggtccactatatagcggcggaagaggaggattgggattacgctcctcttgtattggcaccagatgaccgctcatacaaaagccagtacctcaacaacggaccgcagagaattggccggaagtataagaaagtgcgatttatggcctatacagacgaaacctttaagacaagggaggccatccagcatgagagtgggattttgggacctcttctttacggcgaagttggtgataccctcctcatcatcttcaagaatcaagcttctcgcccctataacatttacccacacgggatcactgacgttaggcctttgtatagcagaagacttcccaaaggcgtgaagcatctcaaagacttccccattttgccaggcgagatctttaagtacaaatggaccgtcacagtggaagatggaccgactaaatcagaccctcgatgccttacgcggtactattcctccttcgtgaatatggagagagatttggcaagcggactcataggaccactcctcatctgttacaaggaatctgtagaccagaggggtaaccagattatgagtgataaacgcaatgtgatcctttttagcgtcttcgacgagaaccggtcctggtacttgaccgagaatatacaaaggttccttcccaaccccgcaggcgttcagttggaagaccctgagtttcaggccagcaatattatgcactcaatcaacggctatgtgtttgatagtctccagctttctgtttgcctccatgaagtagcctattggtacatcttgtcaattggtgctcaaacagacttcctctccgtcttcttctccggctacacctttaagcacaagatggtgtatgaggacactctcacactctttccattttctggagaaaccgtgttcatgagcatggagaatccaggcctttggatcttgggttgccacaacagtgattttcgcaatcggggaatgactgctctcctcaaagtcagcagctgtgataagaacacaggcgactattacgaagattcttacgaggacataagtgcctacttgttgtccaagaataacgccattgagcccagatcattctcccagaatcctcccgtgcttaaaaggcatcagcgcgaaatcaccagaactactcttcagtctgatcaagaggagattgactatgacgacaccataagcgtggaaatgaagaaggaggatttcgatatctatgacgaagataataaccagtctccgcggagctttcagaagaagacgcgacactacttcattgcagcagtcgaaaggctttgggactacggtatgtcatcatcccctcatgtgttgcgcaatagagctcagagtggaagtgttccacagttcaagaaagtcgtctttcaagagtttacagatggcagcttcacacagcctctctatcggggcgagcttaacgaacatttgggactccttggtccctatatccgagccgaagtggaggacaacattatggttacctttaggaatcaagcctctcgcccctacagcttctactcctccctcatcagttatgaggaggatcagagacaaggcgctgaaccacggaagaactttgtgaaaccgaatgagacgaagacctacttctggaaagtacagcaccacatggcccccacaaaagacgaattcgattgcaaagcatgggcgtatttttcagacgttgacttggagaaagatgtacattcaggacttattggtcctttgttggtgtgtcacactaacactctcaatccagcccatggcaggcaggtgacagtccaggaattcgctcttttctttaccatctttgatgagaccaagtcctggtacttcacggaaaacatggagcgcaattgcagagccccctgtaacatacagatggaggaccctacctttaaggaaaattatcggttccacgcaatcaacggatacattatggatacactccctggccttgtgatggctcaggaccaacgaatcaggtggtacctcctcagcatgggttctaatgagaacatacactccattcacttttcaggacatgtgttcactgtccggaagaaagaagagtataagatggccctctacaatttgtatccaggcgtgtttgagaccgttgaaatgcttccctctaaagctggcatctggagagtagagtgcttgatcggagaacatcttcacgcaggtatgagcaccttgttcctcgtgtacagcaacaaatgtcagaccccacttggcatggccagtggacacattcgcgactttcagatcacagcatctggccagtatggacaatgggccccaaagttggctcgcctccattactccggtagcataaatgcgtggtccactaaagaacctttcagctggattaaggtcgatcttcttgcccccatgatcatccacggcattaagacacagggagcgaggcagaaattctcctccctctacatctcacagttcattattatgtatagtttggacggcaagaagtggcaaacttatagaggtaacagtactggaacactcatggtgttcttcggcaacgttgatagctctggcatcaaacacaacatctttaatcctcccataatagctcggtacatcagattgcatccgacccactacagcattaggagtacactccgaatggagcttatgggttgcgacttgaattcctgttcaatgccactcggaatggagtctaaagccatctctgatgcacagataaccgccagtagctactttacgaacatgtttgctacgtggtcaccctctaaggcaaggcttcatttgcaaggccggtctaatgcctggagacctcaggtgaacaacccgaaagaatggctccaggtggactttcagaagaccatgaaagtaacaggtgtcactactcagggagttaagtccttgctcaccagcatgtatgtgaaggagttccttatttcctcatcacaagatggccaccagtggaccctcttctttcagaatggtaaggtcaaagtgtttcagggcaatcaagacagcttcacacccgtggtgaacagtcttgatcctccactcttgacacgataccttcgaatccatccacagtcttgggttcaccagattgcattgcgcatggaagtacttggatgcgaggctcaggacctctac

SEQ ID NO: 2720 - protein, 1457 aa, synthetic construct
  REGION 1..1457: note = Variant of human B-domain deleted Factor VIII
MQIELSTCFFLCLLRFCFSATRRYYLGAVELSWDYMQSDLGELPVDARFPPRVPKSFPFNTSVVYKKTLFVEFTDHLFNIAKPRPPWMGLLGPTIQAEVYDTVVITLKNMASHPVSLHAVGVSYWKASEGAEYDDQTSQREKEDDKVFPGGSHTYVWQVLKENGPMASDPLCLTYSYLSHVDLVKDLNSGLIGALLVCREGSLAKEKTQTLHKFILLFAVFDEGKSWHSETKNSLMQDRDAASARAWPKMHTVNGYVNRSLPGLIGCHRKSVYWHVIGMGTTPEVHSIFLEGHTFLVRNHRQASLEISPITFLTAQTLLMDLGQFLLFCHISSHQHDGMEAYVKVDSCPEEPQLRMKNNEEAEDYDDDLTDSEMDVVRFDDDNSPSFIQIRSVAKKHPKTWVHYIAAEEEDWDYAPLVLAPDDRSYKSQYLNNGPQRIGRKYKKVRFMAYTDETFKTREAIQHESGILGPLLYGEVGDTLLIIFKNQASRPYNIYPHGITDVRPLYSRRLPKGVKHLKDFPILPGEIFKYKWTVTVEDGPTKSDPRCLTRYYSSFVNMERDLASGLIGPLLICYKESVDQRGNQIMSDKRNVILFSVFDENRSWYLTENIQRFLPNPAGVQLEDPEFQASNIMHSINGYVFDSLQLSVCLHEVAYWYILSIGAQTDFLSVFFSGYTFKHKMVYEDTLTLFPFSGETVFMSMENPGLWILGCHNSDFRNRGMTALLKVSSCDKNTGDYYEDSYEDISAYLLSKNNAIEPRSFSQNPPVLKRHQREITRTTLQSDQEEIDYDDTISVEMKKEDFDIYDEDNNQSPRSFQKKTRHYFIAAVERLWDYGMSSSPHVLRNRAQSGSVPQFKKVVFQEFTDGSFTQPLYRGELNEHLGLLGPYIRAEVEDNIMVTFRNQASRPYSFYSSLISYEEDQRQGAEPRKNFVKPNETKTYFWKVQHHMAPTKDEFDCKAWAYFSDVDLEKDVHSGLIGPLLVCHTNTLNPAHGRQVTVQEFALFFTIFDETKSWYFTENMERNCRAPCNIQMEDPTFKENYRFHAINGYIMDTLPGLVMAQDQRIRWYLLSMGSNENIHSIHFSGHVFTVRKKEEYKMALYNLYPGVFETVEMLPSKAGIWRVECLIGEHLHAGMSTLFLVYSNKCQTPLGMASGHIRDFQITASGQYGQWAPKLARLHYSGSINAWSTKEPFSWIKVDLLAPMIIHGIKTQGARQKFSSLYISQFIIMYSLDGKKWQTYRGNSTGTLMVFFGNVDSSGIKHNIFNPPIIARYIRLHPTHYSIRSTLRMELMGCDLNSCSMPLGMESKAISDAQITASSYFTNMFATWSPSKARLHLQGRSNAWRPQVNNPKEWLQVDFQKTMKVTGVTTQGVKSLLTSMYVKEFLISSSQDGHQWTLFFQNGKVKVFQGNQDSFTPVVNSLDPPLLTRYLRIHPQSWVHQIALRMEVLGCEAQDLY

SEQ ID NO: 2721 - DNA, 4371 bp, synthetic construct
  misc_feature 1..4371: note = Variant of human B-domain deleted Factor VIII
  source 1..4371: mol_type = other DNA
atgcagattgaactgtctacctgcttcttcctctgtttgctgaggttctgctttagcgccactagacggtactaccttggcgctgtggagctgtcctgggactatatgcagagtgatttgggagagcttcccgtcgacgcacgatttcctcctcgcgttccaaagtcatttcccttcaacacaagcgtggtgtacaagaagacgctcttcgtcgaattcaccgatcacctgttcaatatcgccaaacccagaccaccatggatgggtcttttggggcctaccatacaagcggaggtgtatgacacagttgttatcactctcaagaacatggcttctcatccggtaagtcttcacgcagtgggcgtgtcctactggaaagcttcagaaggagccgagtatgatgatcagacatcccagagggagaaagaagacgacaaggtatttccaggtgggtctcatacctatgtgtggcaagtgctcaaagagaatggccctatggcaagcgatccgctctgtttgacttacagctacctttcacacgttgacctcgtcaaggacctcaactccgggttgattggagccttgttggtatgcagggaaggatctcttgccaaagagaagacacagaccctccacaagtttatccttctctttgctgtgttcgatgagggcaaaagttggcatagcgaaacgaagaattccctcatgcaggatcgcgacgcagccagcgccagagcttggcccaagatgcacactgtgaacggatatgtcaataggtcacttcctggcttgattgggtgtcatcggaaaagtgtctactggcacgtgatcggaatggggacaacaccagaggtccactccatatttctcgaaggccataccttccttgttcgaaaccacagacaggcatccttggagatctctcccattacctttctcactgcccaaacgctccttatggacttgggtcagttccttctcttctgccatatcagctcacaccagcatgatggtatggaagcttatgtgaaagtcgacagttgtcctgaggagccacagttgcgcatgaagaataatgaagaagccgaggattacgacgacgatctcaccgattctgagatggacgtggtgaggtttgatgacgacaactctccctccttcattcaaatccggagcgtggcgaagaaacaccccaagacttgggtccactatatagcggcggaagaggaggattgggattacgctcctcttgtattggcaccagatgaccgctcatacaaaagccagtacctcaacaacggaccgcagagaattggccggaagtataagaaagtgcgatttatggcctatacagacgaaacctttaagacaagggaggccatccagcatgagagtgggattttgggacctcttctttacggcgaagttggtgataccctcctcatcatcttcaagaatcaagcttctcgcccctataacatttacccacacgggatcactgacgttaggcctttgtatagcagaagacttcccaaaggcgtgaagcatctcaaagacttccccattttgccaggcgagatctttaagtacaaatggaccgtcacagtggaagatggaccgactaaatcagaccctcgatgccttacgcggtactattcctccttcgtgaatatggagagagatttggcaagcggactcataggaccactcctcatctgttacaaggaatctgtagaccagaggggtaaccagattatgagtgataaacgcaatgtgatcctttttagcgtcttcgacgagaaccggtcctggtacttgaccgagaatatacaaaggttccttcccaaccccgcaggcgttcagttggaagaccctgagtttcaggccagcaatattatgcactcaatcaacggctatgtgtttgatagtctccagctttctgtttgcctccatgaagtagcctattggtacatcttgtcaattggtgctcaaacagacttcctctccgtcttcttctccggctacacctttaagcacaagatggtgtatgaggacactctcacactctttccattttctggagaaaccgtgttcatgagcatggagaatccaggcctttggatcttgggttgccacaacagtgattttcgcaatcggggaatgactgctctcctcaaagtcagcagctgtgataagaacacaggcgactattacgaagattcttacgaggacataagtgcctacttgttgtccaagaataacgccattgagcccagatcattctcccagaatcctcccgtgcttaaaaggcatcagcgcgaaatcaccagaactactcttcagtctgatcaagaggagattgactatgacgacaccataagcgtggaaatgaagaaggaggatttcgatatctatgacgaagattctaaccagtctccgcggagctttcagaagaagacgcgacactacttcattgcagcagtcgaaaggctttgggactacggtatgtcatcatcccctcatgtgttgcgcaatagagctcagagtggaagtgttccacagttcaagaaagtcgtctttcaagagtttacagatggcagcttcacacagcctctctatcggggcgagcttaacgaacatttgggactccttggtccctatatccgagccgaagtggaggacaacattatggttacctttaggaatcaagcctctcgcccctacagcttctactcctccctcatcagttatgaggaggatcagagacaaggcgctgaaccacggaagaactttgtgaaaccgaatgagacgaagacctacttctggaaagtacagcaccacatggcccccacaaaagacgaattcgattgcaaagcatgggcgtatttttcagacgttgacttggagaaagatgtacattcaggacttattggtcctttgttggtgtgtcacactaacactctcaatccagcccatggcaggcaggtgacagtccaggaattcgctcttttctttaccatctttgatgagaccaagtcctggtacttcacggaaaacatggagcgcaattgcagagccccctgtaacatacagatggaggaccctacctttaaggaaaattatcggttccacgcaatcaacggatacattatggatacactccctggccttgtgatggctcaggaccaacgaatcaggtggtacctcctcagcatgggttctaatgagaacatacactccattcacttttcaggacatgtgttcactgtccggaagaaagaagagtataagatggccctctacaatttgtatccaggcgtgtttgagaccgttgaaatgcttccctctaaagctggcatctggagagtagagtgcttgatcggagaacatcttcacgcaggtatgagcaccttgttcctcgtgtacagcaacaaatgtcagaccccacttggcatggccagtggacacattcgcgactttcagatcacagcatctggccagtatggacaatgggccccaaagttggctcgcctccattactccggtagcataaatgcgtggtccactaaagaacctttcagctggattaaggtcgatcttcttgcccccatgatcatccacggcattaagacacagggagcgaggcagaaattctcctccctctacatctcacagttcattattatgtatagtttggacggcaagaagtggcaaacttatagaggtaacagtactggaacactcatggtgttcttcggcaacgttgatagctctggcatcaaacacaacatctttaatcctcccataatagctcggtacatcagattgcatccgacccactacagcattaggagtacactccgaatggagcttatgggttgcgacttgaattcctgttcaatgccactcggaatggagtctaaagccatctctgatgcacagataaccgccagtagctactttacgaacatgtttgctacgtggtcaccctctaaggcaaggcttcatttgcaaggccggtctaatgcctggagacctcaggtgaacaacccgaaagaatggctccaggtggactttcagaagaccatgaaagtaacaggtgtcactactcagggagttaagtccttgctcaccagcatgtatgtgaaggagttccttatttcctcatcacaagatggccaccagtggaccctcttctttcagaatggtaaggtcaaagtgtttcagggcaatcaagacagcttcacacccgtggtgaacagtcttgatcctccactcttgacacgataccttcgaatccatccacagtcttgggttcaccagattgcattgcgcatggaagtacttggatgcgaggctcaggacctctac

SEQ ID NO: 2722 - protein, 1457 aa, synthetic construct
  REGION 1..1457: note = Variant of human B-domain deleted Factor VIII
MQIELSTCFFLCLLRFCFSATRRYYLGAVELSWDYMQSDLGELPVDARFPPRVPKSFPFNTSVVYKKTLFVEFTDHLFNIAKPRPPWMGLLGPTIQAEVYDTVVITLKNMASHPVSLHAVGVSYWKASEGAEYDDQTSQREKEDDKVFPGGSHTYVWQVLKENGPMASDPLCLTYSYLSHVDLVKDLNSGLIGALLVCREGSLAKEKTQTLHKFILLFAVFDEGKSWHSETKNSLMQDRDAASARAWPKMHTVNGYVNRSLPGLIGCHRKSVYWHVIGMGTTPEVHSIFLEGHTFLVRNHRQASLEISPITFLTAQTLLMDLGQFLLFCHISSHQHDGMEAYVKVDSCPEEPQLRMKNNEEAEDYDDDLTDSEMDVVRFDDDNSPSFIQIRSVAKKHPKTWVHYIAAEEEDWDYAPLVLAPDDRSYKSQYLNNGPQRIGRKYKKVRFMAYTDETFKTREAIQHESGILGPLLYGEVGDTLLIIFKNQASRPYNIYPHGITDVRPLYSRRLPKGVKHLKDFPILPGEIFKYKWTVTVEDGPTKSDPRCLTRYYSSFVNMERDLASGLIGPLLICYKESVDQRGNQIMSDKRNVILFSVFDENRSWYLTENIQRFLPNPAGVQLEDPEFQASNIMHSINGYVFDSLQLSVCLHEVAYWYILSIGAQTDFLSVFFSGYTFKHKMVYEDTLTLFPFSGETVFMSMENPGLWILGCHNSDFRNRGMTALLKVSSCDKNTGDYYEDSYEDISAYLLSKNNAIEPRSFSQNPPVLKRHQREITRTTLQSDQEEIDYDDTISVEMKKEDFDIYDEDSNQSPRSFQKKTRHYFIAAVERLWDYGMSSSPHVLRNRAQSGSVPQFKKVVFQEFTDGSFTQPLYRGELNEHLGLLGPYIRAEVEDNIMVTFRNQASRPYSFYSSLISYEEDQRQGAEPRKNFVKPNETKTYFWKVQHHMAPTKDEFDCKAWAYFSDVDLEKDVHSGLIGPLLVCHTNTLNPAHGRQVTVQEFALFFTIFDETKSWYFTENMERNCRAPCNIQMEDPTFKENYRFHAINGYIMDTLPGLVMAQDQRIRWYLLSMGSNENIHSIHFSGHVFTVRKKEEYKMALYNLYPGVFETVEMLPSKAGIWRVECLIGEHLHAGMSTLFLVYSNKCQTPLGMASGHIRDFQITASGQYGQWAPKLARLHYSGSINAWSTKEPFSWIKVDLLAPMIIHGIKTQGARQKFSSLYISQFIIMYSLDGKKWQTYRGNSTGTLMVFFGNVDSSGIKHNIFNPPIIARYIRLHPTHYSIRSTLRMELMGCDLNSCSMPLGMESKAISDAQITASSYFTNMFATWSPSKARLHLQGRSNAWRPQVNNPKEWLQVDFQKTMKVTGVTTQGVKSLLTSMYVKEFLISSSQDGHQWTLFFQNGKVKVFQGNQDSFTPVVNSLDPPLLTRYLRIHPQSWVHQIALRMEVLGCEAQDLY

SEQ ID NO: 2723 - DNA, 4371 bp, synthetic construct
  misc_feature 1..4371: note = Variant of human B-domain deleted Factor VIII
  source 1..4371: mol_type = other DNA
atgcagattgaactgtctacctgcttcttcctctgtttgctgaggttctgctttagcgccactagacggtactaccttggcgctgtggagctgtcctgggactatatgcagagtgatttgggagagcttcccgtcgacgcacgatttcctcctcgcgttccaaagtcatttcccttcaacacaagcgtggtgtacaagaagacgctcttcgtcgaattcaccgatcacctgttcaatatcgccaaacccagaccaccatggatgggtcttttggggcctaccatacaagcggaggtgtatgacacagttgttatcactctcaagaacatggcttctcatccggtaagtcttcacgcagtgggcgtgtcctactggaaagcttcagaaggagccgagtatgatgatcagacatcccagagggagaaagaagacgacaaggtatttccaggtgggtctcatacctatgtgtggcaagtgctcaaagagaatggccctatggcaagcgatccgctctgtttgacttacagctacctttcacacgttgacctcgtcaaggacctcaactccgggttgattggagccttgttggtatgcagggaaggatctcttgccaaagagaagacacagaccctccacaagtttatccttctctttgctgtgttcgatgagggcaaaagttggcatagcgaaacgaagaattccctcatgcaggatcgcgacgcagccagcgccagagcttggcccaagatgcacactgtgaacggatatgtcaataggtcacttcctggcttgattgggtgtcatcggaaaagtgtctactggcacgtgatcggaatggggacaacaccagaggtccactccatatttctcgaaggccataccttccttgttcgaaaccacagacaggcatccttggagatctctcccattacctttctcactgcccaaacgctccttatggacttgggtcagttccttctcttctgccatatcagctcacaccagcatgatggtatggaagcttatgtgaaagtcgacagttgtcctgaggagccacagttgcgcatgaagaataatgaagaagccgaggattacgacgacgatctcaccgattctgagatggacgtggtgaggtttgatgacgacaactctccctccttcattcaaatccggagcgtggcgaagaaacaccccaagacttgggtccactatatagcggcggaagaggaggattgggattacgctcctcttgtattggcaccagatgaccgctcatacaaaagccagtacctcaacaacggaccgcagagaattggccggaagtataagaaagtgcgatttatggcctatacagacgaaacctttaagacaagggaggccatccagcatgagagtgggattttgggacctcttctttacggcgaagttggtgataccctcctcatcatcttcaagaatcaagcttctcgcccctataacatttacccacacgggatcactgacgttaggcctttgtatagcagaagacttcccaaaggcgtgaagcatctcaaagacttccccattttgccaggcgagatctttaagtacaaatggaccgtcacagtggaagatggaccgactaaatcagaccctcgatgccttacgcggtactattcctccttcgtgaatatggagagagatttggcaagcggactcataggaccactcctcatctgttacaaggaatctgtagaccagaggggtaaccagattatgagtgataaacgcaatgtgatcctttttagcgtcttcgacgagaaccggtcctggtacttgaccgagaatatacaaaggttccttcccaaccccgcaggcgttcagttggaagaccctgagtttcaggccagcaatattatgcactcaatcaacggctatgtgtttgatagtctccagctttctgtttgcctccatgaagtagcctattggtacatcttgtcaattggtgctcaaacagacttcctctccgtcttcttctccggctacacctttaagcacaagtttgtgtatgaggacactctcacactctttccattttctggagaaaccgtgttcatgagcatggagaatccaggcctttggatcttgggttgccacaacagtgattttcgcaatcggggaatgactgctctcctcaaagtcagcagctgtgataagaacacaggcgactattacgaagattcttacgaggacataagtgcctacttgttgtccaagaataacgccattgagcccagatcattctcccagaatcctcccgtgcttaaaaggcatcagcgcgaaatcaccagaactactcttcagtctgatcaagaggagattgactatgacgacaccataagcgtggaaatgaagaaggaggatttcgatatctatgacgaagatgagaaccagtctccgcggagctttcagaagaagacgcgacactacttcattgcagcagtcgaaaggctttgggactacggtatgtcatcatcccctcatgtgttgcgcaatagagctcagagtggaagtgttccacagttcaagaaagtcgtctttcaagagtttacagatggcagcttcacacagcctctctatcggggcgagcttaacgaacatttgggactccttggtccctatatccgagccgaagtggaggacaacattatggttacctttaggaatcaagcctctcgcccctacagcttctactcctccctcatcagttatgaggaggatcagagacaaggcgctgaaccacggaagaactttgtgaaaccgaatgagacgaagacctacttctggaaagtacagcaccacatggcccccacaaaagacgaattcgattgcaaagcatgggcgtatttttcagacgttgacttggagaaagatgtacattcaggacttattggtcctttgttggtgtgtcacactaacactctcaatccagcccatggcaggcaggtgacagtccaggaattcgctcttttctttaccatctttgatgagaccaagtcctggtacttcacggaaaacatggagcgcaattgcagagccccctgtaacatacagatggaggaccctacctttaaggaaaattatcggttccacgcaatcaacggatacattatggatacactccctggccttgtgatggctcaggaccaacgaatcaggtggtacctcctcagcatgggttctaatgagaacatacactccattcacttttcaggacatgtgttcactgtccggaagaaagaagagtataagatggccctctacaatttgtatccaggcgtgtttgagaccgttgaaatgcttccctctaaagctggcatctggagagtagagtgcttgatcggagaacatcttcacgcaggtatgagcaccttgttcctcgtgtacagcaacaaatgtcagaccccacttggcatggccagtggacacattcgcgactttcagatcacagcatctggccagtatggacaatgggccccaaagttggctcgcctccattactccggtagcataaatgcgtggtccactaaagaacctttcagctggattaaggtcgatcttcttgcccccatgatcatccacggcattaagacacagggagcgaggcagaaattctcctccctctacatctcacagttcattattatgtatagtttggacggcaagaagtggcaaacttatagaggtaacagtactggaacactcatggtgttcttcggcaacgttgatagctctggcatcaaacacaacatctttaatcctcccataatagctcggtacatcagattgcatccgacccactacagcattaggagtacactccgaatggagcttatgggttgcgacttgaattcctgttcaatgccactcggaatggagtctaaagccatctctgatgcacagataaccgccagtagctactttacgaacatgtttgctacgtggtcaccctctaaggcaaggcttcatttgcaaggccggtctaatgcctggagacctcaggtgaacaacccgaaagaatggctccaggtggactttcagaagaccatgaaagtaacaggtgtcactactcagggagttaagtccttgctcaccagcatgtatgtgaaggagttccttatttcctcatcacaagatggccaccagtggaccctcttctttcagaatggtaaggtcaaagtgtttcagggcaatcaagacagcttcacacccgtggtgaacagtcttgatcctccactcttgacacgataccttcgaatccatccacagtcttgggttcaccagattgcattgcgcatggaagtacttggatgcgaggctcaggacctctac

SEQ ID NO: 2724 - protein, 1457 aa, synthetic construct
  REGION 1..1457: note = Variant of human B-domain deleted Factor VIII
MQIELSTCFFLCLLRFCFSATRRYYLGAVELSWDYMQSDLGELPVDARFPPRVPKSFPFNTSVVYKKTLFVEFTDHLFNIAKPRPPWMGLLGPTIQAEVYDTVVITLKNMASHPVSLHAVGVSYWKASEGAEYDDQTSQREKEDDKVFPGGSHTYVWQVLKENGPMASDPLCLTYSYLSHVDLVKDLNSGLIGALLVCREGSLAKEKTQTLHKFILLFAVFDEGKSWHSETKNSLMQDRDAASARAWPKMHTVNGYVNRSLPGLIGCHRKSVYWHVIGMGTTPEVHSIFLEGHTFLVRNHRQASLEISPITFLTAQTLLMDLGQFLLFCHISSHQHDGMEAYVKVDSCPEEPQLRMKNNEEAEDYDDDLTDSEMDVVRFDDDNSPSFIQIRSVAKKHPKTWVHYIAAEEEDWDYAPLVLAPDDRSYKSQYLNNGPQRIGRKYKKVRFMAYTDETFKTREAIQHESGILGPLLYGEVGDTLLIIFKNQASRPYNIYPHGITDVRPLYSRRLPKGVKHLKDFPILPGEIFKYKWTVTVEDGPTKSDPRCLTRYYSSFVNMERDLASGLIGPLLICYKESVDQRGNQIMSDKRNVILFSVFDENRSWYLTENIQRFLPNPAGVQLEDPEFQASNIMHSINGYVFDSLQLSVCLHEVAYWYILSIGAQTDFLSVFFSGYTFKHKFVYEDTLTLFPFSGETVFMSMENPGLWILGCHNSDFRNRGMTALLKVSSCDKNTGDYYEDSYEDISAYLLSKNNAIEPRSFSQNPPVLKRHQREITRTTLQSDQEEIDYDDTISVEMKKEDFDIYDEDENQSPRSFQKKTRHYFIAAVERLWDYGMSSSPHVLRNRAQSGSVPQFKKVVFQEFTDGSFTQPLYRGELNEHLGLLGPYIRAEVEDNIMVTFRNQASRPYSFYSSLISYEEDQRQGAEPRKNFVKPNETKTYFWKVQHHMAPTKDEFDCKAWAYFSDVDLEKDVHSGLIGPLLVCHTNTLNPAHGRQVTVQEFALFFTIFDETKSWYFTENMERNCRAPCNIQMEDPTFKENYRFHAINGYIMDTLPGLVMAQDQRIRWYLLSMGSNENIHSIHFSGHVFTVRKKEEYKMALYNLYPGVFETVEMLPSKAGIWRVECLIGEHLHAGMSTLFLVYSNKCQTPLGMASGHIRDFQITASGQYGQWAPKLARLHYSGSINAWSTKEPFSWIKVDLLAPMIIHGIKTQGARQKFSSLYISQFIIMYSLDGKKWQTYRGNSTGTLMVFFGNVDSSGIKHNIFNPPIIARYIRLHPTHYSIRSTLRMELMGCDLNSCSMPLGMESKAISDAQITASSYFTNMFATWSPSKARLHLQGRSNAWRPQVNNPKEWLQVDFQKTMKVTGVTTQGVKSLLTSMYVKEFLISSSQDGHQWTLFFQNGKVKVFQGNQDSFTPVVNSLDPPLLTRYLRIHPQSWVHQIALRMEVLGCEAQDLY

SEQ ID NO: 2725 - DNA, 4371 bp, synthetic construct
  misc_feature 1..4371: note = Variant of human B-domain deleted Factor VIII
  source 1..4371: mol_type = other DNA
atgcagattgaactgtctacctgcttcttcctctgtttgctgaggttctgctttagcgccactagacggtactaccttggcgctgtggagctgtcctgggactatatgcagagtgatttgggagagcttcccgtcgacgcacgatttcctcctcgcgttccaaagtcatttcccttcaacacaagcgtggtgtacaagaagacgctcttcgtcgaattcaccgatcacctgttcaatatcgccaaacccagaccaccatggatgggtcttttggggcctaccatacaagcggaggtgtatgacacagttgttatcactctcaagaacatggcttctcatccggtaagtcttcacgcagtgggcgtgtcctactggaaagcttcagaaggagccgagtatgatgatcagacatcccagagggagaaagaagacgacaaggtatttccaggtgggtctcatacctatgtgtggcaagtgctcaaagagaatggccctatggcaagcgatccgctctgtttgacttacagctacctttcacacgttgacctcgtcaaggacctcaactccgggttgattggagccttgttggtatgcagggaaggatctcttgccaaagagaagacacagaccctccacaagtttatccttctctttgctgtgttcgatgagggcaaaagttggcatagcgaaacgaagaattccctcatgcaggatcgcgacgcagccagcgccagagcttggcccaagatgcacactgtgaacggatatgtcaataggtcacttcctggcttgattgggtgtcatcggaaaagtgtctactggcacgtgatcggaatggggacaacaccagaggtccactccatatttctcgaaggccataccttccttgttcgaaaccacagacaggcatccttggagatctctcccattacctttctcactgcccaaacgctccttatggacttgggtcagttccttctcttctgccatatcagctcacaccagcatgatggtatggaagcttatgtgaaagtcgacagttgtcctgaggagccacagttgcgcatgaagaataatgaagaagccgaggattacgacgacgatctcaccgattctgagatggacgtggtgaggtttgatgacgacaactctccctccttcattcaaatccggagcgtggcgaagaaacaccccaagacttgggtccactatatagcggcggaagaggaggattgggattacgctcctcttgtattggcaccagatgaccgctcatacaaaagccagtacctcaacaacggaccgcagagaattggccggaagtataagaaagtgcgatttatggcctatacagacgaaacctttaagacaagggaggccatccagcatgagagtgggattttgggacctcttctttacggcgaagttggtgataccctcctcatcatcttcaagaatcaagcttctcgcccctataacatttacccacacgggatcactgacgttaggcctttgtatagcagaagacttcccaaaggcgtgaagcatctcaaagacttccccattttgccaggcgagatctttaagtacaaatggaccgtcacagtggaagatggaccgactaaatcagaccctcgatgccttacgcggtactattcctccttcgtgaatatggagagagatttggcaagcggactcataggaccactcctcatctgttacaaggaatctgtagaccagaggggtaaccagattatgagtgataaacgcaatgtgatcctttttagcgtcttcgacgagaaccggtcctggtacttgaccgagaatatacaaaggttccttcccaaccccgcaggcgttcagttggaagaccctgagtttcaggccagcaatattatgcactcaatcaacggctatgtgtttgatagtctccagctttctgtttgcctccatgaagtagcctattggtacatcttgtcaattggtgctcaaacagacttcctctccgtcttcttctccggctacacctttaagcacaagatggtgtatgaggacactctcacactctttccattttctggagaaaccgtgttcatgagcatggagaatccaggcctttggatcttgggttgccacaacagtgattttcgcaatcggggaatgactgctctcctcaaagtcagcagctgtgattctaacacaggcgactattacgaagattcttacgaggacataagtgcctacttgttgtccaagaataacgccattgagcccagatcattctcccagaatcctcccgtgcttaaaaggcatcagcgcgaaatcaccagaactactcttcagtctgatcaagaggagattgactatgacgacaccataagcgtggaaatgaagaaggaggatttcgatatctatgacgaagatgagaaccagtctccgcggagctttcagaagaagacgcgacactacttcattgcagcagtcgaaaggctttgggactacggtatgtcatcatcccctcatgtgttgcgcaatagagctcagagtggaagtgttccacagttcaagaaagtcgtctttcaagagtttacagatggcagcttcacacagcctctctatcggggcgagcttaacgaacatttgggactccttggtccctatatccgagccgaagtggaggacaacattatggttacctttaggaatcaagcctctcgcccctacagcttctactcctccctcatcagttatgaggaggatcagagacaaggcgctgaaccacggaagaactttgtgaaaccgaatgagacgaagacctacttctggaaagtacagcaccacatggcccccacaaaagacgaattcgattgcaaagcatgggcgtatttttcagacgttgacttggagaaagatgtacattcaggacttattggtcctttgttggtgtgtcacactaacactctcaatccagcccatggcaggcaggtgacagtccaggaattcgctcttttctttaccatctttgatgagaccaagtcctggtacttcacggaaaacatggagcgcaattgcagagccccctgtaacatacagatggaggaccctacctttaaggaaaattatcggttccacgcaatcaacggatacattatggatacactccctggccttgtgatggctcaggaccaacgaatcaggtggtacctcctcagcatgggttctaatgagaacatacactccattcacttttcaggacatgtgttcactgtccggaagaaagaagagtataagatggccctctacaatttgtatccaggcgtgtttgagaccgttgaaatgcttccctctaaagctggcatctggagagtagagtgcttgatcggagaacatcttcacgcaggtatgagcaccttgttcctcgtgtacagcaacaaatgtcagaccccacttggcatggccagtggacacattcgcgactttcagatcacagcatctggccagtatggacaatgggccccaaagttggctcgcctccattactccggtagcataaatgcgtggtccactaaagaacctttcagctggattaaggtcgatcttcttgcccccatgatcatccacggcattaagacacagggagcgaggcagaaattctcctccctctacatctcacagttcattattatgtatagtttggacggcaagaagtggcaaacttatagaggtaacagtactggaacactcatggtgttcttcggcaacgttgatagctctggcatcaaacacaacatctttaatcctcccataatagctcggtacatcagattgcatccgacccactacagcattaggagtacactccgaatggagcttatgggttgcgacttgaattcctgttcaatgccactcggaatggagtctaaagccatctctgatgcacagataaccgccagtagctactttacgaacatgtttgctacgtggtcaccctctaaggcaaggcttcatttgcaaggccggtctaatgcctggagacctcaggtgaacaacccgaaagaatggctccaggtggactttcagaagaccatgaaagtaacaggtgtcactactcagggagttaagtccttgctcaccagcatgtatgtgaaggagttccttatttcctcatcacaagatggccaccagtggaccctcttctttcagaatggtaaggtcaaagtgtttcagggcaatcaagacagcttcacacccgtggtgaacagtcttgatcctccactcttgacacgataccttcgaatccatccacagtcttgggttcaccagattgcattgcgcatggaagtacttggatgcgaggctcaggacctctac

SEQ ID NO: 2726 - protein, 1457 aa, synthetic construct
  REGION 1..1457: note = Variant of human B-domain deleted Factor VIII
MQIELSTCFFLCLLRFCFSATRRYYLGAVELSWDYMQSDLGELPVDARFPPRVPKSFPFNTSVVYKKTLFVEFTDHLFNIAKPRPPWMGLLGPTIQAEVYDTVVITLKNMASHPVSLHAVGVSYWKASEGAEYDDQTSQREKEDDKVFPGGSHTYVWQVLKENGPMASDPLCLTYSYLSHVDLVKDLNSGLIGALLVCREGSLAKEKTQTLHKFILLFAVFDEGKSWHSETKNSLMQDRDAASARAWPKMHTVNGYVNRSLPGLIGCHRKSVYWHVIGMGTTPEVHSIFLEGHTFLVRNHRQASLEISPITFLTAQTLLMDLGQFLLFCHISSHQHDGMEAYVKVDSCPEEPQLRMKNNEEAEDYDDDLTDSEMDVVRFDDDNSPSFIQIRSVAKKHPKTWVHYIAAEEEDWDYAPLVLAPDDRSYKSQYLNNGPQRIGRKYKKVRFMAYTDETFKTREAIQHESGILGPLLYGEVGDTLLIIFKNQASRPYNIYPHGITDVRPLYSRRLPKGVKHLKDFPILPGEIFKYKWTVTVEDGPTKSDPRCLTRYYSSFVNMERDLASGLIGPLLICYKESVDQRGNQIMSDKRNVILFSVFDENRSWYLTENIQRFLPNPAGVQLEDPEFQASNIMHSINGYVFDSLQLSVCLHEVAYWYILSIGAQTDFLSVFFSGYTFKHKMVYEDTLTLFPFSGETVFMSMENPGLWILGCHNSDFRNRGMTALLKVSSCDSNTGDYYEDSYEDISAYLLSKNNAIEPRSFSQNPPVLKRHQREITRTTLQSDQEEIDYDDTISVEMKKEDFDIYDEDENQSPRSFQKKTRHYFIAAVERLWDYGMSSSPHVLRNRAQSGSVPQFKKVVFQEFTDGSFTQPLYRGELNEHLGLLGPYIRAEVEDNIMVTFRNQASRPYSFYSSLISYEEDQRQGAEPRKNFVKPNETKTYFWKVQHHMAPTKDEFDCKAWAYFSDVDLEKDVHSGLIGPLLVCHTNTLNPAHGRQVTVQEFALFFTIFDETKSWYFTENMERNCRAPCNIQMEDPTFKENYRFHAINGYIMDTLPGLVMAQDQRIRWYLLSMGSNENIHSIHFSGHVFTVRKKEEYKMALYNLYPGVFETVEMLPSKAGIWRVECLIGEHLHAGMSTLFLVYSNKCQTPLGMASGHIRDFQITASGQYGQWAPKLARLHYSGSINAWSTKEPFSWIKVDLLAPMIIHGIKTQGARQKFSSLYISQFIIMYSLDGKKWQTYRGNSTGTLMVFFGNVDSSGIKHNIFNPPIIARYIRLHPTHYSIRSTLRMELMGCDLNSCSMPLGMESKAISDAQITASSYFTNMFATWSPSKARLHLQGRSNAWRPQVNNPKEWLQVDFQKTMKVTGVTTQGVKSLLTSMYVKEFLISSSQDGHQWTLFFQNGKVKVFQGNQDSFTPVVNSLDPPLLTRYLRIHPQSWVHQIALRMEVLGCEAQDLY

SEQ ID NO: 2727 - DNA, 4371 bp, synthetic construct
  misc_feature 1..4371: note = Variant of human B-domain deleted Factor VIII
  source 1..4371: mol_type = other DNA
atgcagattgaactgtctacctgcttcttcctctgtttgctgaggttctgctttagcgccactagacggtactaccttggcgctgtggagctgtcctgggactatatgcagagtgatttgggagagcttcccgtcgacgcacgatttcctcctcgcgttccaaagtcatttcccttcaacacaagcgtggtgtacaagaagacgctcttcgtcgaattcaccgatcacctgttcaatatcgccaaacccagaccaccatggatgggtcttttggggcctaccatacaagcggaggtgtatgacacagttgttatcactctcaagaacatggcttctcatccggtaagtcttcacgcagtgggcgtgtcctactggaaagcttcagaaggagccgagtatgatgatcagacatcccagagggagaaagaagacgacaaggtatttccaggtgggtctcatacctatgtgtggcaagtgctcaaagagaatggccctatggcaagcgatccgctctgtttgacttacagctacctttcacacgttgacctcgtcaaggacctcaactccgggttgattggagccttgttggtatgcagggaaggatctcttgccaaagagaagacacagaccctccacaagtttatccttctctttgctgtgttcgatgagggcaaaagttggcatagcgaaacgaagaattccctcatgcaggatcgcgacgcagccagcgccagagcttggcccaagatgcacactgtgaacggatatgtcaataggtcacttcctggcttgattgggtgtcatcggaaaagtgtctactggcacgtgatcggaatggggacaacaccagaggtccactccatatttctcgaaggccataccttccttgttcgaaaccacagacaggcatccttggagatctctcccattacctttctcactgcccaaacgctccttatggacttgggtcagttccttctcttctgccatatcagctcacaccagcatgatggtatggaagcttatgtgaaagtcgacagttgtcctgaggagccacagttgcgcatgaagaataatgaagaagccgaggattacgacgacgatctcaccgattctgagatggacgtggtgaggtttgatgacgacaactctccctccttcattcaaatccggagcgtggcgaagaaacaccccaagacttgggtccactatatagcggcggaagaggaggattgggattacgctcctcttgtattggcaccagatgaccgctcatacaaaagccagtacctcaacaacggaccgcagagaattggccggaagtataagaaagtgcgatttatggcctatacagacgaaacctttaagacaagggaggccatccagcatgagagtgggattttgggacctcttctttacggcgaagttggtgataccctcctcatcatcttcaagaatcaagcttctcgcccctataacatttacccacacgggatcactgacgttaggcctttgtatagcagaagacttcccaaaggcgtgaagcatctcaaagacttccccattttgccaggcgagatctttaagtacaaatggaccgtcacagtggaagatggaccgactaaatcagaccctcgatgccttacgcggtactattcctccttcgtgaatatggagagagatttggcaagcggactcataggaccactcctcatctgttacaaggaatctgtagaccagaggggtaaccagattatgagtgataaacgcaatgtgatcctttttagcgtcttcgacgagaaccggtcctggtacttgaccgagaatatacaaaggttccttcccaaccccgcaggcgttcagttggaagaccctgagtttcaggccagcaatattatgcactcaatcaacggctatgtgtttgatagtctccagctttctgtttgcctccatgaagtagcctattggtacatcttgtcaattggtgctcaaacagacttcctctccgtcttcttctccggctacacctttaagcacaagatggtgtatgaggacactctcacactctttccattttctggagaaaccgtgttcatgagcatggagaatccaggcctttggatcttgggttgccacaacagtgattttcgcaatcggggaatgactgctctcctcaaagtcagcagctgtgataagaacacaggcgactattacgaagattcttacgaggacataagtgcctacttggtgtccaagaataacgccattgagcccagatcattctcccagaatcctcccgtgcttaaaaggcatcagcgcgaaatcaccagaactactcttcagtctgatcaagaggagattgactatgacgacaccataagcgtggaaatgaagaaggaggatttcgatatctatgacgaagatgagaaccagtctccgcggagctttcagaagaagacgcgacactacttcattgcagcagtcgaaaggctttgggactacggtatgtcatcatcccctcatgtgttgcgcaatagagctcagagtggaagtgttccacagttcaagaaagtcgtctttcaagagtttacagatggcagcttcacacagcctctctatcggggcgagcttaacgaacatttgggactccttggtccctatatccgagccgaagtggaggacaacattatggttacctttaggaatcaagcctctcgcccctacagcttctactcctccctcatcagttatgaggaggatcagagacaaggcgctgaaccacggaagaactttgtgaaaccgaatgagacgaagacctacttctggaaagtacagcaccacatggcccccacaaaagacgaattcgattgcaaagcatgggcgtatttttcagacgttgacttggagaaagatgtacattcaggacttattggtcctttgttggtgtgtcacactaacactctcaatccagcccatggcaggcaggtgacagtccaggaattcgctcttttctttaccatctttgatgagaccaagtcctggtacttcacggaaaacatggagcgcaattgcagagccccctgtaacatacagatggaggaccctacctttaaggaaaattatcggttccacgcaatcaacggatacattatggatacactccctggccttgtgatggctcaggaccaacgaatcaggtggtacctcctcagcatgggttctaatgagaacatacactccattcacttttcaggacatgtgttcactgtccggaagaaagaagagtataagatggccctctacaatttgtatccaggcgtgtttgagaccgttgaaatgcttccctctaaagctggcatctggagagtagagtgcttgatcggagaacatcttcacgcaggtatgagcaccttgttcctcgtgtacagcaacaaatgtcagaccccacttggcatggccagtggacacattcgcgactttcagatcacagcatctggccagtatggacaatgggccccaaagttggctcgcctccattactccggtagcataaatgcgtggtccactaaagaacctttcagctggattaaggtcgatcttcttgcccccatgatcatccacggcattaagacacagggagcgaggcagaaattctcctccctctacatctcacagttcattattatgtatagtttggacggcaagaagtggcaaacttatagaggtaacagtactggaacactcatggtgttcttcggcaacgttgatagctctggcatcaaacacaacatctttaatcctcccataatagctcggtacatcagattgcatccgacccactacagcattaggagtacactccgaatggagcttatgggttgcgacttgaattcctgttcaatgccactcggaatggagtctaaagccatctctgatgcacagataaccgccagtagctactttacgaacatgtttgctacgtggtcaccctctaaggcaaggcttcatttgcaaggccggtctaatgcctggagacctcaggtgaacaacccgaaagaatggctccaggtggactttcagaagaccatgaaagtaacaggtgtcactactcagggagttaagtccttgctcaccagcatgtatgtgaaggagttccttatttcctcatcacaagatggccaccagtggaccctcttctttcagaatggtaaggtcaaagtgtttcagggcaatcaagacagcttcacacccgtggtgaacagtcttgatcctccactcttgacacgataccttcgaatccatccacagtcttgggttcaccagattgcattgcgcatggaagtacttggatgcgaggctcaggacctctac

SEQ ID NO: 2728 - protein, 1457 aa, synthetic construct
  REGION 1..1457: note = Variant of human B-domain deleted Factor VIII
MQIELSTCFFLCLLRFCFSATRRYYLGAVELSWDYMQSDLGELPVDARFPPRVPKSFPFNTSVVYKKTLFVEFTDHLFNIAKPRPPWMGLLGPTIQAEVYDTVVITLKNMASHPVSLHAVGVSYWKASEGAEYDDQTSQREKEDDKVFPGGSHTYVWQVLKENGPMASDPLCLTYSYLSHVDLVKDLNSGLIGALLVCREGSLAKEKTQTLHKFILLFAVFDEGKSWHSETKNSLMQDRDAASARAWPKMHTVNGYVNRSLPGLIGCHRKSVYWHVIGMGTTPEVHSIFLEGHTFLVRNHRQASLEISPITFLTAQTLLMDLGQFLLFCHISSHQHDGMEAYVKVDSCPEEPQLRMKNNEEAEDYDDDLTDSEMDVVRFDDDNSPSFIQIRSVAKKHPKTWVHYIAAEEEDWDYAPLVLAPDDRSYKSQYLNNGPQRIGRKYKKVRFMAYTDETFKTREAIQHESGILGPLLYGEVGDTLLIIFKNQASRPYNIYPHGITDVRPLYSRRLPKGVKHLKDFPILPGEIFKYKWTVTVEDGPTKSDPRCLTRYYSSFVNMERDLASGLIGPLLICYKESVDQRGNQIMSDKRNVILFSVFDENRSWYLTENIQRFLPNPAGVQLEDPEFQASNIMHSINGYVFDSLQLSVCLHEVAYWYILSIGAQTDFLSVFFSGYTFKHKMVYEDTLTLFPFSGETVFMSMENPGLWILGCHNSDFRNRGMTALLKVSSCDKNTGDYYEDSYEDISAYLVSKNNAIEPRSFSQNPPVLKRHQREITRTTLQSDQEEIDYDDTISVEMKKEDFDIYDEDENQSPRSFQKKTRHYFIAAVERLWDYGMSSSPHVLRNRAQSGSVPQFKKVVFQEFTDGSFTQPLYRGELNEHLGLLGPYIRAEVEDNIMVTFRNQASRPYSFYSSLISYEEDQRQGAEPRKNFVKPNETKTYFWKVQHHMAPTKDEFDCKAWAYFSDVDLEKDVHSGLIGPLLVCHTNTLNPAHGRQVTVQEFALFFTIFDETKSWYFTENMERNCRAPCNIQMEDPTFKENYRFHAINGYIMDTLPGLVMAQDQRIRWYLLSMGSNENIHSIHFSGHVFTVRKKEEYKMALYNLYPGVFETVEMLPSKAGIWRVECLIGEHLHAGMSTLFLVYSNKCQTPLGMASGHIRDFQITASGQYGQWAPKLARLHYSGSINAWSTKEPFSWIKVDLLAPMIIHGIKTQGARQKFSSLYISQFIIMYSLDGKKWQTYRGNSTGTLMVFFGNVDSSGIKHNIFNPPIIARYIRLHPTHYSIRSTLRMELMGCDLNSCSMPLGMESKAISDAQITASSYFTNMFATWSPSKARLHLQGRSNAWRPQVNNPKEWLQVDFQKTMKVTGVTTQGVKSLLTSMYVKEFLISSSQDGHQWTLFFQNGKVKVFQGNQDSFTPVVNSLDPPLLTRYLRIHPQSWVHQIALRMEVLGCEAQDLY

SEQ ID NO: 2729 - DNA, 4371 bp, synthetic construct
  misc_feature 1..4371: note = Variant of human B-domain deleted Factor VIII
  source 1..4371: mol_type = other DNA
atgcagattgaactgtctacctgcttcttcctctgtttgctgaggttctgctttagcgccactagacggtactaccttggcgctgtggagctgtcctgggactatatgcagagtgatttgggagagcttcccgtcgacgcacgatttcctcctcgcgttccaaagtcatttcccttcaacacaagcgtggtgtacaagaagacgctcttcgtcgaattcaccgatcacctgttcaatatcgccaaacccagaccaccatggatgggtcttttggggcctaccatacaagcggaggtgtatgacacagttgttatcactctcaagaacatggcttctcatccggtaagtcttcacgcagtgggcgtgtcctactggaaagcttcagaaggagccgagtatgatgatcagacatcccagagggagaaagaagacgacaaggtatttccaggtgggtctcatacctatgtgtggcaagtgctcaaagagaatggccctatggcaagcgatccgctctgtttgacttacagctacctttcacacgttgacctcgtcaaggacctcaactccgggttgattggagccttgttggtatgcagggaaggatctcttgccaaagagaagacacagaccctccacaagtttatccttctctttgctgtgttcgatgagggcaaaagttggcatagcgaaacgaagaattccctcatgcaggatcgcgacgcagccagcgccagagcttggcccaagatgcacactgtgaacggatatgtcaataggtcacttcctggcttgattgggtgtcatcggaaaagtgtctactggcacgtgatcggaatggggacaacaccagaggtccactccatatttctcgaaggccataccttccttgttcgaaaccacagacaggcatccttggagatctctcccattacctttctcactgcccaaacgctccttatggacttgggtcagttccttctcttctgccatatcagctcacaccagcatgatggtatggaagcttatgtgaaagttgacagttgtcctgaggagccacagttgcgcatgaagaataatgaagaagccgaggattacgacgacgatctcaccgattctgagatggacgtggtgaggtttgatgacgacaactctccctccttcattcaaatccggagcgtggcgaagaaacaccccaagacttgggtccactatatagcggcggaagaggaggattgggattacgctcctcttgtattggcaccagatgaccgctcatacaaaagccagtacctcaacaacggaccgcagagaattggccggaagtataagaaagtgcgatttatggcctatacagacgaaacctttaagacaagggaggccatccagcatgagagtgggattttgggacctcttctttacggcgaagttggtgataccctcctcatcatcttcaagaatcaagcttctcgcccctataacatttacccacacgggatcactgacgttaggcctttgtatagcagaagacttcccaaaggcgtgaagcatctcaaagacttccccattttgccaggcgagatctttaagtacaaatggaccgtcacagtggaagatggaccgactaaatcagaccctcgatgccttacgcggtactattcctccttcgtgaatatggagagagatttggcaagcggactcataggaccactcctcatctgttacaaggaatctgtagaccagaggggtaaccagattatgagtgataaacgcaatgtgatcctttttagcgtcttcgacgagaaccggtcctggtacttgaccgagaatatacaaaggttccttcccaaccccgcaggcgttcagttggaagaccctgagtttcaggccagcaatattatgcactcaatcaacggctatgtgtttgatagtctccagctttctgtttgcctccatgaagtagcctattggtacatcttgtcaattggtgctcaaacagacttcctctccgtcttcttctccggctacacctttaagcacaagatggtgtatgaggacactctcacactctttccattttctggagaaaccgtgttcatgagcatggagaatccaggcctttggatcttgggttgccacaacagtgattttcgcaatcggggaatgactgctctcctcaaagtcagcagctgtgataagaacacaggcgactattacgaagattcttacgaggacataagtgcctacttgttgtccaagaataacgccattgagcccagatcattctcccagaatcctcccgtgcttaaaaggcatcagcgcgaaatcaccagaactactcttcagtctgatcaagaggagattgactatgacgacaccataagcgtggaaatgaagaaggaggatttcgatatctatgacgaagatgagaaccagtctccgcggagctttcagaagaagacgcgacactacttcattgcagcagtcgaaaggctttgggactacggtatgtcatcatcccctcatgtgttgcgcaatagagctcagagtggaagtgttccacagttcaagaaagtcgtctttcaagagtttacagatggcagcttcacacagcctctctatcggggcgagcttaacgaacatttgggactccttggtccctatatccgagccgaagtggaggacaacattatggttacctttaggaatcaagcctctcgcccctacagcttctactcctccctcatcagttatgaggaggatcagagacaaggcgctgaaccacggaagaactttgtgaaaccgaatgagacgaagacctacttctggaaagtacagcaccacatggcccccacaaaagacgaattcgattgcaaagcatgggcgtatttttcagacgttgacttggagaaagatgtacattcaggacttattggtcctttgttggtgtgtcacactaacactctcaatccagcccatggcaggcaggtgacagtccaggaattcgctcttttctttaccatctttgatgagaccaagtcctggtacttcacggaaaacatggagcgcaattgcagagccccctgtaacatacagatggaggaccctacctttaaggaaaattatcggttccacgcaatcaacggatacattatggatacactccctggccttgtgatggctcaggaccaacgaatcaggtggtacctcctcagcatgggttctaatgagaacatacactccattcacttttcaggacatgtgttcactgtccggaagaaagaagagtataagatggccctctacaatttgtatccaggcgtgtttgagaccgttgaaatgcttccctctaaagctggcatctggagagtagagtgcttgatcggagaacatcttcacgcaggtatgagcaccttgttcctcgtgtacagcaacaaatgtcagaccccacttggcatggccagtggacacattcgcgactttcagatcacagcatctggccagtatggacaatgggccccaaagttggctcgcctccattactccggtagcataaatgcgtggtccactaaagaacctttcagctggattaaggtcgatcttcttgcccccatgatcatccacggcattaagacacagggagcgaggcagaaattctcctccctctacatctcacagttcattattatgtatagtttggacggcaagaagtggcaaacttatagaggtaacagtactggaacactcatggtgttcttcggcaacgttgatagctctggcatcaaacacaacatctttaatcctcccataatagctcggtacatcagattgcatccgacccactacagcattaggagtacactccgaatggagcttatgggttgcgacttgaattcctgttcaatgccactcggaatggagtctaaagccatctctgatgcacagataaccgccagtagctactttacgaacatgtttgctacgtggtcaccctctaaggcaaggcttcatttgcaaggccggtctaatgcctggagacctcaggtgaacaacccgaaagaatggctccaggtggactttcagaagaccatgaaagtaacaggtgtcactactcagggagttaagtccttgctcaccagcatgtatgtgaaggagttccttatttcctcatcacaagatggccaccagtggaccctcttctttcagaatggtaaggtcaaagtgtttcagggcaatcaagacgcgttcacacccgtggtgaacagtcttgatcctccactcttgacacgataccttcgaatccatccacagtcttgggttcaccagattgcattgcgcatggaagtacttggatgcgaggctcaggacctctac

SEQ ID NO: 2730 - protein, 1457 aa, synthetic construct
  REGION 1..1457: note = Variant of human B-domain deleted Factor VIII
MQIELSTCFFLCLLRFCFSATRRYYLGAVELSWDYMQSDLGELPVDARFPPRVPKSFPFNTSVVYKKTLFVEFTDHLFNIAKPRPPWMGLLGPTIQAEVYDTVVITLKNMASHPVSLHAVGVSYWKASEGAEYDDQTSQREKEDDKVFPGGSHTYVWQVLKENGPMASDPLCLTYSYLSHVDLVKDLNSGLIGALLVCREGSLAKEKTQTLHKFILLFAVFDEGKSWHSETKNSLMQDRDAASARAWPKMHTVNGYVNRSLPGLIGCHRKSVYWHVIGMGTTPEVHSIFLEGHTFLVRNHRQASLEISPITFLTAQTLLMDLGQFLLFCHISSHQHDGMEAYVKVDSCPEEPQLRMKNNEEAEDYDDDLTDSEMDVVRFDDDNSPSFIQIRSVAKKHPKTWVHYIAAEEEDWDYAPLVLAPDDRSYKSQYLNNGPQRIGRKYKKVRFMAYTDETFKTREAIQHESGILGPLLYGEVGDTLLIIFKNQASRPYNIYPHGITDVRPLYSRRLPKGVKHLKDFPILPGEIFKYKWTVTVEDGPTKSDPRCLTRYYSSFVNMERDLASGLIGPLLICYKESVDQRGNQIMSDKRNVILFSVFDENRSWYLTENIQRFLPNPAGVQLEDPEFQASNIMHSINGYVFDSLQLSVCLHEVAYWYILSIGAQTDFLSVFFSGYTFKHKMVYEDTLTLFPFSGETVFMSMENPGLWILGCHNSDFRNRGMTALLKVSSCDKNTGDYYEDSYEDISAYLLSKNNAIEPRSFSQNPPVLKRHQREITRTTLQSDQEEIDYDDTISVEMKKEDFDIYDEDENQSPRSFQKKTRHYFIAAVERLWDYGMSSSPHVLRNRAQSGSVPQFKKVVFQEFTDGSFTQPLYRGELNEHLGLLGPYIRAEVEDNIMVTFRNQASRPYSFYSSLISYEEDQRQGAEPRKNFVKPNETKTYFWKVQHHMAPTKDEFDCKAWAYFSDVDLEKDVHSGLIGPLLVCHTNTLNPAHGRQVTVQEFALFFTIFDETKSWYFTENMERNCRAPCNIQMEDPTFKENYRFHAINGYIMDTLPGLVMAQDQRIRWYLLSMGSNENIHSIHFSGHVFTVRKKEEYKMALYNLYPGVFETVEMLPSKAGIWRVECLIGEHLHAGMSTLFLVYSNKCQTPLGMASGHIRDFQITASGQYGQWAPKLARLHYSGSINAWSTKEPFSWIKVDLLAPMIIHGIKTQGARQKFSSLYISQFIIMYSLDGKKWQTYRGNSTGTLMVFFGNVDSSGIKHNIFNPPIIARYIRLHPTHYSIRSTLRMELMGCDLNSCSMPLGMESKAISDAQITASSYFTNMFATWSPSKARLHLQGRSNAWRPQVNNPKEWLQVDFQKTMKVTGVTTQGVKSLLTSMYVKEFLISSSQDGHQWTLFFQNGKVKVFQGNQDAFTPVVNSLDPPLLTRYLRIHPQSWVHQIALRMEVLGCEAQDLY

SEQ ID NO: 2731 - DNA, 4371 bp, synthetic construct
  misc_feature 1..4371: note = Variant of human B-domain deleted Factor VIII
  source 1..4371: mol_type = other DNA
atgcagattgaactgtctacctgcttcttcctctgtttgctgaggttctgctttagcgccactagacggtactaccttggcgctgtggagctgtcctgggactatatgcagagtgatttgggagagcttcccgtcgacgcacgatttcctcctcgcgttccaaagtcatttcccttcaacacaagcgtggtgtacaagaagacgctcttcgtcgaattcaccgatcacctgttcaatatcgccaaacccagaccaccatggatgggtcttttggggcctaccatacaagcggaggtgtatgacacagttgttatcactctcaagaacatggcttctcatccggtaagtcttcacgcagtgggcgtgtcctactggaaagcttcagaaggagccgagtatgatgatcagacatcccagagggagaaagaagacgacaaggtatttccaggtgggtctcatacctatgtgtggcaagtgctcaaagagaatggccctatggcaagcgatccgctctgtttgacttacagctacctttcacacgttgacctcgtcaaggacctcaactccgggttgattggagccttgttggtatgcagggaaggatctcttgccaaagagaagacacagacactccacaagtttatccttctctttgctgtgttcgatgagggcaaaagttggcatagcgaaacgaagaattccctcatgcaggatcgcgacgcagccagcgccagagcttggcccaagatgcacactgtgaacggatatgtcaataggtcacttcctggcttgattgggtgtcatcggaaaagtgtctactggcacgtgatcggaatggggacaacaccagaggtccactccatatttctcgaaggccataccttccttgttcgaaaccacagacaggcatccttggagatctctcccattacctttctcactgcccaaacgctccttatggacttgggtcagttccttctcttctgccatatcagctcacaccagcatgatggtatggaagcttatgtgaaagtcgacagttgtcctgaggagccacagttgcgcatgaagaataatgaagaagccgaggattacgacgacgatctcaccgattctgagatggacgtggtgaggtttgatgacgacaactctccctccttcattcaaatccggagcgtggcgaagaaacaccccaagacttgggtccactatatagcggcggaagaggaggattgggattacgctcctcttgtattggcaccagatgaccgctcatacaaaagccagtacctcaacaacggaccgcagagaattggccggaagtataagaaagtgcgatttatggcctatacagacgaaacctttaagacaagggaggccatccagcatgagagtgggattttgggacctcttctttacggcgaagttggtgataccctcctcatcatcttcaagaatcaagcttctcgcccctataacatttacccacacgggatcactgacgttaggcctttgtatagcagaagacttcccaaaggcgtgaagcatctcaaagacttccccattttgccaggcgagatctttaagtacaaatggaccgtcacagtggaagatggaccgactaaatcagaccctcgatgccttacgcggtactattcctccttcgtgaatatggagagagatttggcaagcggactcataggaccactcctcatctgttacaaggaatctgtagaccagaggggtaaccagattatgagtgataaacgcaatgtgatcctttttagcgtcttcgacgagaaccggtcctggtacttgaccgagaatatacaaaggttccttcccaaccccgcaggcgttcagttggaagaccctgagtttcaggccagcaatattatgcactcaatcaacggctatgtgtttgatagtctccagctttctgtttgcctccatgaagtagcctattggtacatcttgtcaattggtgctcaaacagacttcctctccgtcttcttctccggctacacctttaagcacaagatggtgtatgaggacactctcacactctttccattttctggagaaaccgtgttcatgagcatggagaatccaggcctttggatcttgggttgccacaacagtgattttcgcaatcggggaatgactgctctcctcaaagtcagcagctgtgataagaacacaggcgactattacgaagattcttacgaggacataagtgcctacttgttgtccaagaataacgccattgagcccagatcattctcccagaatcctcccgtgcttaaaaggcatcagcgcgaaatcaccagaactactcttcagtctgatcaagaggagattgactatgacgacaccataagcgtggaaatgaagaaggaggatttcgatatctatgacgaagatacgaaccagtctccgcggagctttcagaagaagacgcgacactacttcattgcagcagtcgaaaggctttgggactacggtatgtcatcatcccctcatgtgttgcgcaatagagctcagagtggaagtgttccacagttcaagaaagtcgtctttcaagagtttacagatggcagcttcacacagcctctctatcggggcgagcttaacgaacatttgggactccttggtccctatatccgagccgaagtggaggacaacattatggttacatttaggaatcaagcctctcgcccctacagcttctactcctccctcatcagttatgaggaggatcagagacaaggcgctgaaccacggaagaactttgtgaaaccgaatgagacgaagacctacttctggaaagtacagcaccacatggcccccacaaaagacgaattcgattgcaaagcatgggcgtatttttcagacgttgacttggagaaagatgtacattcaggacttattggtcctttgttggtgtgtcacactaacactctcaatccagcccatggcaggcaggtgacagtccaggaattcgctcttttctttaccatctttgatgagaccaagtcctggtacttcacggaaaacatggagcgcaattgcagagccccctgtaacatacagatggaggaccctacctttaaggaaaattatcggttccacgcaatcaacggatacattatggatacactccctggccttgtgatggctcaggaccaacgaatcaggtggtacctcctcagcatgggttctaatgagaacatacactccattcacttttcaggacatgtgttcactgtccggaagaaagaagagtataagatggccctctacaatttgtatccaggcgtgtttgagaccgttgaaatgcttccctctaaagctggcatctggagagtagagtgcttgatcggagaacatcttcacgcaggtatgagcaccttgttcctcgtgtacagcaacaaatgtcagaccccacttggcatggccagtggacacattcgcgactttcagatcacagcatctggccagtatggacaatgggccccaaagttggctcgcctccattactccggtagcataaatgcgtggtccactaaagaacctttcagctggattaaggtcgatcttcttgcccccatgatcatccacggcattaagacacagggagcgaggcagaaattctcctccctctacatctcacagttcattattatgtatagtttggacggcaagaagtggcaaacttatagaggtaacagtactggaacactcatggtgttcttcggcaacgttgatagctctggcatcaaacacaacatctttaatcctcccataatagctcggtacatcagattgcatccgacccactacagcattaggagtacactccgaatggagcttatgggttgcgacttgaattcctgttcaatgccactcggaatggagtctaaagccatctctgatgcacagataaccgccagtagctactttacgaacatgtttgctacgtggtcaccctctaaggcaaggcttcatttgcaaggccggtctaatgcctggagacctcaggtgaacaacccgaaagaatggctccaggtggactttcagaagaccatgaaagtaacaggtgtcactactcagggagttaagtccttgctcaccagcatgtatgtgaaggagttccttatttcctcatcacaagatggccaccagtggaccctcttctttcagaatggtaaggtcaaagtgtttcagggcaatcaagacagcttcacacccgtggtgaacagtcttgatcctccactcttgacacgataccttcgaatccatccacagtcttgggttcaccagattgcattgcgcatggaagtacttggatgcgaggctcaggacctctac

SEQ ID NO: 2732 - protein, 1457 aa, synthetic construct
  REGION 1..1457: note = Variant of human B-domain deleted Factor VIII
MQIELSTCFFLCLLRFCFSATRRYYLGAVELSWDYMQSDLGELPVDARFPPRVPKSFPFNTSVVYKKTLFVEFTDHLFNIAKPRPPWMGLLGPTIQAEVYDTVVITLKNMASHPVSLHAVGVSYWKASEGAEYDDQTSQREKEDDKVFPGGSHTYVWQVLKENGPMASDPLCLTYSYLSHVDLVKDLNSGLIGALLVCREGSLAKEKTQTLHKFILLFAVFDEGKSWHSETKNSLMQDRDAASARAWPKMHTVNGYVNRSLPGLIGCHRKSVYWHVIGMGTTPEVHSIFLEGHTFLVRNHRQASLEISPITFLTAQTLLMDLGQFLLFCHISSHQHDGMEAYVKVDSCPEEPQLRMKNNEEAEDYDDDLTDSEMDVVRFDDDNSPSFIQIRSVAKKHPKTWVHYIAAEEEDWDYAPLVLAPDDRSYKSQYLNNGPQRIGRKYKKVRFMAYTDETFKTREAIQHESGILGPLLYGEVGDTLLIIFKNQASRPYNIYPHGITDVRPLYSRRLPKGVKHLKDFPILPGEIFKYKWTVTVEDGPTKSDPRCLTRYYSSFVNMERDLASGLIGPLLICYKESVDQRGNQIMSDKRNVILFSVFDENRSWYLTENIQRFLPNPAGVQLEDPEFQASNIMHSINGYVFDSLQLSVCLHEVAYWYILSIGAQTDFLSVFFSGYTFKHKMVYEDTLTLFPFSGETVFMSMENPGLWILGCHNSDFRNRGMTALLKVSSCDKNTGDYYEDSYEDISAYLLSKNNAIEPRSFSQNPPVLKRHQREITRTTLQSDQEEIDYDDTISVEMKKEDFDIYDEDTNQSPRSFQKKTRHYFIAAVERLWDYGMSSSPHVLRNRAQSGSVPQFKKVVFQEFTDGSFTQPLYRGELNEHLGLLGPYIRAEVEDNIMVTFRNQASRPYSFYSSLISYEEDQRQGAEPRKNFVKPNETKTYFWKVQHHMAPTKDEFDCKAWAYFSDVDLEKDVHSGLIGPLLVCHTNTLNPAHGRQVTVQEFALFFTIFDETKSWYFTENMERNCRAPCNIQMEDPTFKENYRFHAINGYIMDTLPGLVMAQDQRIRWYLLSMGSNENIHSIHFSGHVFTVRKKEEYKMALYNLYPGVFETVEMLPSKAGIWRVECLIGEHLHAGMSTLFLVYSNKCQTPLGMASGHIRDFQITASGQYGQWAPKLARLHYSGSINAWSTKEPFSWIKVDLLAPMIIHGIKTQGARQKFSSLYISQFIIMYSLDGKKWQTYRGNSTGTLMVFFGNVDSSGIKHNIFNPPIIARYIRLHPTHYSIRSTLRMELMGCDLNSCSMPLGMESKAISDAQITASSYFTNMFATWSPSKARLHLQGRSNAWRPQVNNPKEWLQVDFQKTMKVTGVTTQGVKSLLTSMYVKEFLISSSQDGHQWTLFFQNGKVKVFQGNQDSFTPVVNSLDPPLLTRYLRIHPQSWVHQIALRMEVLGCEAQDLY

SEQ ID NO: 2733 - DNA, 4371 bp, synthetic construct
  misc_feature 1..4371: note = Variant of human B-domain deleted Factor VIII
  source 1..4371: mol_type = other DNA
atgcagattgaactgtctacctgcttcttcctctgtttgctgaggttctgctttagcgccactagacggtactaccttggcgctgtggagctgtcctgggactatatgcagagtgatttgggagagcttcccgtcgacgcacgatttcctcctcgcgttccaaagtcatttcccttcaacacaagcgtggtgtacaagaagacgctcttcgtcgaattcaccgatcacctgttcaatatcgccaaacccagaccaccatggatgggtcttttggggcctaccatacaagcggaggtgtatgacacagttgttatcactctcaagaacatggcttctcatccggtaagtcttcacgcagtgggcgtgtcctactggaaagcttcagaaggagccgagtatgatgatcagacatcccagagggagaaagaagacgacaaggtatttccaggtgggtctcatacctatgtgtggcaagtgctcaaagagaatggccctatggcaagcgatccgctctgtttgacttacagctacctttcacacgttgacctcgtcaaggacctcaactccgggttgattggagccttgttggtatgcagggaaggatctcttgccaaagagaagacacagaccctccacaagtttatccttctctttgctgtgttcgatgagggcaaaagttggcatagcgaaacgaagaattccctcatgcaggatcgcgacgcagccagcgccagagcttggcccaagatgcacactgtgaacggatatgtcaataggtcacttcctggcttgattgggtgtcatcggaaaagtgtctactggcacgtgatcggaatggggacaacaccagaggtccactccatatttctcgaaggccataccttccttgttcgaaaccacagacaggcatccttggagatctctcccattacctttctcactgcccaaacgctccttatggacttgggtcagttccttctcttctgccatatcagctcacaccagcatgatggtatggaagcttatgtgaaagtcgacagttgtcctgaggagccacagttgcgcatgaagaataatgaagaagccgaggattacgacgacgatctcaccgattctgagatggacgtggtgaggtttgatgacgacaactctccctccttcattcaaatccggagcgtggcgaagaaacaccccaagacttgggtccactatatagcggcggaagaggaggattgggattacgctcctcttgtattggcaccagatgaccgctcatacaaaagccagtacctcaacaacggaccgcagagaattggccggaagtataagaaagtgcgatttatggcctatacagacgaaacctttaagacaagggaggccatccagcatgagagtgggattttgggacctcttctttacggcgaagttggtgataccctcctcatcatcttcaagaatcaagcttctcgcccctataacatttacccacacgggatcactgacgttaggcctttgtatagcagaagacttcccaaaggcgtgaagcatctcaaagacttccccattttgccaggcgagatctttaagtacaaatggaccgtcacagtggaagatggaccgactaaatcagaccctcgatgccttacgcggtactattcctccttcgtgaatatggagagagatttggcaagcggactcataggaccactcctcatctgttacaaggaatctgtagaccagaggggtaaccagattatgagtgataaacgcaatgtgatcctttttagcgtcttcgacgagaaccggtcctggtacttgaccgagaatatacaaaggttccttcccaaccccgcaggcgttcagttggaagaccctgagtttcaggccagcaatattatgcactcaatcaacggctatgtgtttgatagtctccagctttctgtttgcctccatgaagtagcctattggtacatcttgtcaattggtgctcaaacagacttcctctccgtcttcttctccggctacacctttaagcacaagatggtgtatgaggacactctcacactctttccattttctggagaaaccgtgttcatgagcatggagaatccaggcctttggatcttgggttgccacaacagtgattttcgcaatcggggaatgactgctctcctcaaagtcagcagctgtgataagaacacaggcgactattacgaagattcttacgaggacataagtgcctacttgttgtccaagaataacgccattgagcccagatcattctcccagaatcctcccgtgcttaaaaggcatcagcgcgaaatcaccagaactactcttcagtctgatcaagaggagattgactatgacgacaccataagcgtggaaatgaagaaggaggatttcgatatctatgacgaagatgagaaccagtctccgcggagctttcagaagaagacgcgacactacttcattgcagcagtcgaaaggctttgggactacggtatgtcatcatcccctcatgtgttgcgcaatagagctcagagtggaagtgttccacagttcaagaaagtcgtctttcaagagtttacagatggcagcttcacacagcctctctatcggggcgagcttaacgaacatttgggactccttggtccctatatccgagccgaagtggaggacaacattatggttacctttaggaatcaagcctctcgcccctacagcttctactcctccctcatcagttatgaggaggatcagagacaaggcgctgaaccacggaagaactttgtgaaaccgaatgagacgaagacctacttctggaaagtacagcaccacatggcccccacaaaagacgaattcgattgcaaagcatgggcgtatttttcagacgttgacttggagaaagatgtacattcaggacttattggtcctttgttggtgtgtcacactaacactctcaatccagcccatggcaggcaggtgacagtccaggaattcgctcttttctttaccatctttgatgagaccaagtcctggtacttcacggaaaacatggagcgcaattgcagagccccctgtaacatacagatggaggaccctacctttaaggaaaattatcggttccacgcaatcaacggatacattatggatacactccctggccttgtgatggctcaggaccaacgaatcaggtggtacctcctcagcatgggttctaatgagaacatacactccattcacttttcaggacatgtgttcactgtccggaagcaggaagagtataagatggccctctacaatttgtatccaggcgtgtttgagaccgttgaaatgcttccctctaaagctggcatctggagagtagagtgcttgatcggagaacatcttcacgcaggtatgagcaccttgttcctcgtgtacagcaacaaatgtcagaccccacttggcatggccagtggacacattcgcgactttcagatcacagcatctggccagtatggacaatgggccccaaagttggctcgcctccattactccggtagcataaatgcgtggtccactaaagaacctttcagctggattaaggtcgatcttcttgcccccatgatcatccacggcattaagacacagggagcgaggcagaaattctcctccctctacatctcacagttcattattatgtatagtttggacggcaagaagtggcaaacttatagaggtaacagtactggaacactcatggtgttcttcggcaacgttgatagctctggcatcaaacacaacatctttaatcctcccataatagctcggtacatcagattgcatccgacccactacagcattaggagtacactccgaatggagcttatgggttgcgacttgaattcctgttcaatgccactcggaatggagtctaaagccatctctgatgcacagataaccgccagtagctactttacgaacatgtttgctacgtggtcaccctctaaggcaaggcttcatttgcaaggccggtctaatgcctggagacctcaggtgaacaacccgaaagaatggctccaggtggactttcagaagaccatgaaagtaacaggtgtcactactcagggagttaagtccttgctcaccagcatgtatgtgaaggagttccttatttcctcatcacaagatggccaccagtggaccctcttctttcagaatggtaaggtcaaagtgtttcagggcaatcaagacagcttcacacccgtggtgaacagtcttgatcctccactcttgacacgataccttcgaatccatccacagtcttgggttcaccagattgcattgcgcatggaagtacttggatgcgaggctcaggacctctac

SEQ ID NO: 2734 - protein, 1457 aa, synthetic construct
  REGION 1..1457: note = Variant of human B-domain deleted Factor VIII
MQIELSTCFFLCLLRFCFSATRRYYLGAVELSWDYMQSDLGELPVDARFPPRVPKSFPFNTSVVYKKTLFVEFTDHLFNIAKPRPPWMGLLGPTIQAEVYDTVVITLKNMASHPVSLHAVGVSYWKASEGAEYDDQTSQREKEDDKVFPGGSHTYVWQVLKENGPMASDPLCLTYSYLSHVDLVKDLNSGLIGALLVCREGSLAKEKTQTLHKFILLFAVFDEGKSWHSETKNSLMQDRDAASARAWPKMHTVNGYVNRSLPGLIGCHRKSVYWHVIGMGTTPEVHSIFLEGHTFLVRNHRQASLEISPITFLTAQTLLMDLGQFLLFCHISSHQHDGMEAYVKVDSCPEEPQLRMKNNEEAEDYDDDLTDSEMDVVRFDDDNSPSFIQIRSVAKKHPKTWVHYIAAEEEDWDYAPLVLAPDDRSYKSQYLNNGPQRIGRKYKKVRFMAYTDETFKTREAIQHESGILGPLLYGEVGDTLLIIFKNQASRPYNIYPHGITDVRPLYSRRLPKGVKHLKDFPILPGEIFKYKWTVTVEDGPTKSDPRCLTRYYSSFVNMERDLASGLIGPLLICYKESVDQRGNQIMSDKRNVILFSVFDENRSWYLTENIQRFLPNPAGVQLEDPEFQASNIMHSINGYVFDSLQLSVCLHEVAYWYILSIGAQTDFLSVFFSGYTFKHKMVYEDTLTLFPFSGETVFMSMENPGLWILGCHNSDFRNRGMTALLKVSSCDKNTGDYYEDSYEDISAYLLSKNNAIEPRSFSQNPPVLKRHQREITRTTLQSDQEEIDYDDTISVEMKKEDFDIYDEDENQSPRSFQKKTRHYFIAAVERLWDYGMSSSPHVLRNRAQSGSVPQFKKVVFQEFTDGSFTQPLYRGELNEHLGLLGPYIRAEVEDNIMVTFRNQASRPYSFYSSLISYEEDQRQGAEPRKNFVKPNETKTYFWKVQHHMAPTKDEFDCKAWAYFSDVDLEKDVHSGLIGPLLVCHTNTLNPAHGRQVTVQEFALFFTIFDETKSWYFTENMERNCRAPCNIQMEDPTFKENYRFHAINGYIMDTLPGLVMAQDQRIRWYLLSMGSNENIHSIHFSGHVFTVRKQEEYKMALYNLYPGVFETVEMLPSKAGIWRVECLIGEHLHAGMSTLFLVYSNKCQTPLGMASGHIRDFQITASGQYGQWAPKLARLHYSGSINAWSTKEPFSWIKVDLLAPMIIHGIKTQGARQKFSSLYISQFIIMYSLDGKKWQTYRGNSTGTLMVFFGNVDSSGIKHNIFNPPIIARYIRLHPTHYSIRSTLRMELMGCDLNSCSMPLGMESKAISDAQITASSYFTNMFATWSPSKARLHLQGRSNAWRPQVNNPKEWLQVDFQKTMKVTGVTTQGVKSLLTSMYVKEFLISSSQDGHQWTLFFQNGKVKVFQGNQDSFTPVVNSLDPPLLTRYLRIHPQSWVHQIALRMEVLGCEAQDLY

SEQ ID NO: 2735 - DNA, 4371 bp, synthetic construct
  misc_feature 1..4371: note = Variant of human B-domain deleted Factor VIII
  source 1..4371: mol_type = other DNA
atgcagattgaactgtctacctgcttcttcctctgtttgctgaggttctgctttagcgccactagacggtactaccttggcgctgtggagctgtcctgggactatatgcagagtgatttgggagagcttcccgtcgacgcacgatttcctcctcgcgttccaaagtcatttcccttcaacacaagcgtggtgtacaagaagacgctcttcgtcgaattcaccgatcacctgttcaatatcgccaaacccagaccaccatggatgggtcttttggggcctaccatacaagcggaggtgtatgacacagttgttatcactctcaagaacatggcttctcatccggtaagtcttcacgcagtgggcgtgtcctactggaaagcttcagaaggagccgagtatgatgatcagacatcccagagggagaaagaagacgacaaggtatttccaggtgggtctcatacctatgtgtggcaagtgctcaaagagaatggccctatggcaagcgatccgctctgtttgacttacagctacctttcacacgttgacctcgtcaaggacctcaactccgggttgattggagccttgttggtatgcagggaaggatctcttgccaaagagaagacacagaccctccacaagtttatccttctctttgctgtgttcgatgagggcaaaagttggcatagcgaaacgaagaattccctcatgcaggatcgcgacgcagccagcgccagagcttggcccaagatgcacactgtgaacggatatgtcaataggtcacttcctggcttgattgggtgtcatcggaaaagtgtctactggcacgtgatcggaatggggacaacaccagaggtccactccatatttctcgaaggccataccttccttgttcgaaaccacagacaggcatccttggagatctctcccattacctttctcactgcccaaacgctccttatggacttgggtcagttccttctcttctgccatatcagctcacaccagcatgatggtatggaagcttatgtgaaagtcgacagttgtcctgaggagccacagttgcgcatgaagaataatgaagaagccgaggattacgacgacgatctcaccgattctgagatggacgtggtgaggtttgatgacgacaactctccctccttcattcaaatccggagcgtggcgaagaaacaccccaagacttgggtccactatatagcggcggaagaggaggattgggattacgctcctcttgtattggcaccagatgaccgctcatacaaaagccagtacctcaacaacggaccgcagagaattggccggaagtataagaaagtgcgatttatggcctatacagacgaaacctttaagacaagggaggccatccagcatgagagtgggattttgggacctcttctttacggcgaagttggtgataccctcctcatcatcttcaagaatcaagcttctcgcccctataacatttacccacacgggatcactgacgttaggcctttgtatagcagaagacttcccaaaggcgtgaagcatctcaaagacttccccattttgccaggcgagatctttaagtacaaatggaccgtcacagtggaagatggaccgactaaatcagaccctcgatgccttacgcggtactattcctccttcgtgaatatggagagagatttggcaagcggactcataggaccactcctcatctgttacaaggaatctgtagaccagaggggtaaccagattatgagtgataaacgcaatgtgatcctttttagcgtcttcgacgagaaccggtcctggtacttgaccgagaatatacaaaggttccttcccaaccccgcaggcgttcagttggaagaccctgagtttcaggccagcaatattatgcactcaatcaacggctatgtgtttgatagtctccagctttctgtttgcctccatgaagtagcctattggtacatcttgtcaattggtgctcaaacagacttcctctccgtcttcttctccggctacacctttaagcacaagatggtgtatgaggacactctcacactctttccattttctggagaaaccgtgttcatgagcatggagaatccaggcctttggatcttgggttgccacaacagtgattttcgcaatcggggaatgactgctctcctcaaagtcagcagctgtgataagaacacaggcgactattacgaagattcttacgaggacataagtgcctacttgttgtccaagaataacgccattgagcccagatcattctcccagaatcctcccgtgcttaaaaggcatcagcgcgaaatcaccagaactactcttcagtctgatcaagaggagattgactatgacgacaccataagcgtggaaatgaagaaggaggatttcgatatctatgacgaagatgagaaccagtctccgcggagctttcagaagaagacgcgacactacttcattgcagcagtcgaaaggctttgggactacggtatgtcatcatcccctcatgtgttgcgcaatagagctcagagtggaagtgttccacagttcaagaaagtcgtctttcaagagtttacagatggcagcttcacacagcctctctatcggggcgagcttaacgaacatttgggactccttggtccctatatccgagccgaagtggaggacaacattatggttacctttaggaatcaagcctctcgcccctacagcttctactcctccctcatcagttatgaggaggatcagagacaaggcgctgaaccacggaagaactttgtgaaaccgaatgagacgaagacctacttctggaaagtacagcaccacatggcccccacaaaagacgaattcgattgcaaagcatgggcgtatttttcagacgttgacttggagaaagatgtacattcaggacttattggtcctttgttggtgtgtcacactaacactctcaatccagcccatggcaggcaggtgacagtccaggaattcgctcttttctttaccatctttgatgagaccaagtcctggtacttcacggaaaacatggagcgcaattgcagagccccctgtaacatacagatggaggaccctacctttaaggaaaattatcggttccacgcaatcaacggatacattatggatacactccctggccttgtgatggctcaggaccaacgaatcaggtggtacctcctcagcatgggttctaatgagaacatacactccattcacttttcaggacatgtgttcactgtccggaagaaagaagagtataagatggccctctacaatttgtatccaggcgtgtttgagaccgttgaaatgcttccctctaaagctggcatctggagagtagagtgcttgatcggagaacatcttcacgcaggtatgagcaccttgttcctcgtgtacagcaacaaatgtcagaccccacttggcatggccagtggacacattcgcgactttcagatcacagcatctggccagtatggacaatgggccccaaagttggctcgcctccattactccggtagcataaatgcgtggtccactaaagaacctttcagctggattaaggtcgatcttcttgcccccatgatcatccacggcattaagacacagggagcgaggcagaaattctcctccctctacatctcacagttcattattatgtatagtttggacggcaagaagtggcaaacttatagaggtaacagtactggaacagagatggtgttcttcggcaacgttgatagctctggcatcaaacacaacatctttaatcctcccataatagctcggtacatcagattgcatccgacccactacagcattaggagtacactccgaatggagcttatgggttgcgacttgaattcctgttcaatgccactcggaatggagtctaaagccatctctgatgcacagataaccgccagtagctactttacgaacatgtttgctacgtggtcaccctctaaggcaaggcttcatttgcaaggccggtctaatgcctggagacctcaggtgaacaacccgaaagaatggctccaggtggactttcagaagaccatgaaagtaacaggtgtcactactcagggagttaagtccttgctcaccagcatgtatgtgaaggagttccttatttcctcatcacaagatggccaccagtggaccctcttctttcagaatggtaaggtcaaagtgtttcagggcaatcaagacagcttcacacccgtggtgaacagtcttgatcctccactcttgacacgataccttcgaatccatccacagtcttgggttcaccagattgcattgcgcatggaagtacttggatgcgaggctcaggacctctac

SEQ ID NO: 2736 - protein, 1457 aa, synthetic construct
  REGION 1..1457: note = Variant of human B-domain deleted Factor VIII
MQIELSTCFFLCLLRFCFSATRRYYLGAVELSWDYMQSDLGELPVDARFPPRVPKSFPFNTSVVYKKTLFVEFTDHLFNIAKPRPPWMGLLGPTIQAEVYDTVVITLKNMASHPVSLHAVGVSYWKASEGAEYDDQTSQREKEDDKVFPGGSHTYVWQVLKENGPMASDPLCLTYSYLSHVDLVKDLNSGLIGALLVCREGSLAKEKTQTLHKFILLFAVFDEGKSWHSETKNSLMQDRDAASARAWPKMHTVNGYVNRSLPGLIGCHRKSVYWHVIGMGTTPEVHSIFLEGHTFLVRNHRQASLEISPITFLTAQTLLMDLGQFLLFCHISSHQHDGMEAYVKVDSCPEEPQLRMKNNEEAEDYDDDLTDSEMDVVRFDDDNSPSFIQIRSVAKKHPKTWVHYIAAEEEDWDYAPLVLAPDDRSYKSQYLNNGPQRIGRKYKKVRFMAYTDETFKTREAIQHESGILGPLLYGEVGDTLLIIFKNQASRPYNIYPHGITDVRPLYSRRLPKGVKHLKDFPILPGEIFKYKWTVTVEDGPTKSDPRCLTRYYSSFVNMERDLASGLIGPLLICYKESVDQRGNQIMSDKRNVILFSVFDENRSWYLTENIQRFLPNPAGVQLEDPEFQASNIMHSINGYVFDSLQLSVCLHEVAYWYILSIGAQTDFLSVFFSGYTFKHKMVYEDTLTLFPFSGETVFMSMENPGLWILGCHNSDFRNRGMTALLKVSSCDKNTGDYYEDSYEDISAYLLSKNNAIEPRSFSQNPPVLKRHQREITRTTLQSDQEEIDYDDTISVEMKKEDFDIYDEDENQSPRSFQKKTRHYFIAAVERLWDYGMSSSPHVLRNRAQSGSVPQFKKVVFQEFTDGSFTQPLYRGELNEHLGLLGPYIRAEVEDNIMVTFRNQASRPYSFYSSLISYEEDQRQGAEPRKNFVKPNETKTYFWKVQHHMAPTKDEFDCKAWAYFSDVDLEKDVHSGLIGPLLVCHTNTLNPAHGRQVTVQEFALFFTIFDETKSWYFTENMERNCRAPCNIQMEDPTFKENYRFHAINGYIMDTLPGLVMAQDQRIRWYLLSMGSNENIHSIHFSGHVFTVRKKEEYKMALYNLYPGVFETVEMLPSKAGIWRVECLIGEHLHAGMSTLFLVYSNKCQTPLGMASGHIRDFQITASGQYGQWAPKLARLHYSGSINAWSTKEPFSWIKVDLLAPMIIHGIKTQGARQKFSSLYISQFIIMYSLDGKKWQTYRGNSTGTEMVFFGNVDSSGIKHNIFNPPIIARYIRLHPTHYSIRSTLRMELMGCDLNSCSMPLGMESKAISDAQITASSYFTNMFATWSPSKARLHLQGRSNAWRPQVNNPKEWLQVDFQKTMKVTGVTTQGVKSLLTSMYVKEFLISSSQDGHQWTLFFQNGKVKVFQGNQDSFTPVVNSLDPPLLTRYLRIHPQSWVHQIALRMEVLGCEAQDLY

SEQ ID NO: 2737 - DNA, 4371 bp, synthetic construct
  misc_feature 1..4371: note = Variant of human B-domain deleted Factor VIII
  source 1..4371: mol_type = other DNA
atgcagattgaactgtctacctgcttcttcctctgtttgctgaggttctgctttagcgccactagacggtactaccttggcgctgtggagctgtcctgggactatatgcagagtgatttgggagagcttcccgtcgacgcacgatttcctcctcgcgttccaaagtcatttcccttcaacacaagcgtggtgtacaagaagacgctcttcgtcgaattcaccgatcacctgttcaatatcgccaaacccagaccaccatggatgggtcttttggggcctaccatacaagcggaggtgtatgacacagttgttatcactctcaagaacatggcttctcatccggtaagtcttcacgcagtgggcgtgtcctactggaaagcttcagaaggagccgagtatgatgatcagacatcccagagggagaaagaagacgacaaggtatttccaggtgggtctcatacctatgtgtggcaagtgctcaaagagaatggccctatggcaagcgatccgtggtgtttgacttacagctacctttcacacgttgacctcgtcaaggacctcaactccgggttgattggagccttgttggtatgcagggaaggatctcttgccaaagagaagacacagaccctccacaagtttatccttctctttgctgtgttcgatgagggcaaaagttggcatagcgaaacgaagaattccctcatgcaggatcgcgacgcagccagcgccagagcttggcccaagatgcacactgtgaacggatatgtcaataggtcacttcctggcttgattgggtgtcatcggaaaagtgtctactggcacgtgatcggaatggggacaacaccagaggtccactccatatttctcgaaggccataccttccttgttcgaaaccacagacaggcatccttggagatctctcccattacctttctcactgcccaaacgctccttatggacttgggtcagttccttctcttctgccatatcagctcacaccagcatgatggtatggaagcttatgtgaaagtcgacagttgtcctgaggagccacagttgcgcatgaagaataatgaagaagccgaggattacgacgacgatctcaccgattctgagatggacgtggtgaggtttgatgacgacaactctccctccttcattcaaatccggagcgtggcgaagaaacaccccaagacttgggtccactatatagcggcggaagaggaggattgggattacgctcctcttgtattggcaccagatgaccgctcatacaaaagccagtacctcaacaacggaccgcagagaattggccggaagtataagaaagtgcgatttatggcctatacagacgaaacctttaagacaagggaggccatccagcatgagagtgggattttgggacctcttctttacggcgaagttggtgataccctcctcatcatcttcaagaatcaagcttctcgcccctataacatttacccacacgggatcactgacgttaggcctttgtatagcagaagacttcccaaaggcgtgaagcatctcaaagacttccccattttgccaggcgagatctttaagtacaaatggaccgtcacagtggaagatggaccgactaaatcagaccctcgatgccttacgcggtactattcctccttcgtgaatatggagagagatttggcaagcggactcataggaccactcctcatctgttacaaggaatctgtagaccagaggggtaaccagattatgagtgataaacgcaatgtgatcctttttagcgtcttcgacgagaaccggtcctggtacttgaccgagaatatacaaaggttccttcccaaccccgcaggcgttcagttggaagaccctgagtttcaggccagcaatattatgcactcaatcaacggctatgtgtttgatagtctccagctttctgtttgcctccatgaagtagcctattggtacatcttgtcaattggtgctcaaacagacttcctctccgtcttcttctccggctacacctttaagcacaagatggtgtatgaggacactctcacactctttccattttctggagaaaccgtgttcatgagcatggagaatccaggcctttggatcttgggttgccacaacagtgattttcgcaatcggggaatgactgctctcctcaaagtcagcagctgtgataagaacacaggcgactattacgaagattcttacgaggacataagtgcctacttgttgtccaagaataacgccattgagcccagatcattctcccagaatcctcccgtgcttaaaaggcatcagcgcgaaatcaccagaactactcttcagtctgatcaagaggagattgactatgacgacaccataagcgtggaaatgaagaaggaggatttcgatatctatgacgaagatgagaaccagtctccgcggagctttcagaagaagacgcgacactacttcattgcagcagtcgaaaggctttgggactacggtatgtcatcatcccctcatgtgttgcgcaatagagctcagagtggaagtgttccacagttcaagaaagtcgtctttcaagagtttacagatggcagcttcacacagcctctctatcggggcgagcttaacgaacatttgggactccttggtccctatatccgagccgaagtggaggacaacattatggttacctttaggaatcaagcctctcgcccctacagcttctactcctccctcatcagttatgaggaggatcagagacaaggcgctgaaccacggaagaactttgtgaaaccgaatgagacgaagacctacttctggaaagtacagcaccacatggcccccacaaaagacgaattcgattgcaaagcatgggcgtatttttcagacgttgacttggagaaagatgtacattcaggacttattggtcctttgttggtgtgtcacactaacactctcaatccagcccatggcaggcaggtgacagtccaggaattcgctcttttctttaccatctttgatgagaccaagtcctggtacttcacggaaaacatggagcgcaattgcagagccccctgtaacatacagatggaggaccctacctttaaggaaaattatcggttccacgcaatcaacggatacattatggatacactccctggccttgtgatggctcaggaccaacgaatcaggtggtacctcctcagcatgggttctaatgagaacatacactccattcacttttcaggacatgtgttcactgtccggaagaaagaagagtataagatggccctctacaatttgtatccaggcgtgtttgagaccgttgaaatgcttccctctaaagctggcatctggagagtagagtgcttgatcggagaacatcttcacgcaggtatgagcaccttgttcctcgtgtacagcaacaaatgtcagaccccacttggcatggccagtggacacattcgcgactttcagatcacagcatctggccagtatggacaatgggccccaaagttggctcgcctccattactccggtagcataaatgcgtggtccactaaagaacctttcagctggattaaggtcgatcttcttgcccccatgatcatccacggcattaagacacagggagcgaggcagaaattctcctccctctacatctcacagttcattattatgtatagtttggacggcaagaagtggcaaacttatagaggtaacagtactggaacactcatggtgttcttcggcaacgttgatagctctggcatcaaacacaacatctttaatcctcccataatagctcggtacatcagattgcatccgacccactacagcattaggagtacactccgaatggagcttatgggttgcgacttgaattcctgttcaatgccactcggaatggagtctaaagccatctctgatgcacagataaccgccagtagctactttacgaacatgtttgctacgtggtcaccctctaaggcaaggcttcatttgcaaggccggtctaatgcctggagacctcaggtgaacaacccgaaagaatggctccaggtggactttcagaagaccatgaaagtaacaggtgtcactactcagggagttaagtccttgctcaccagcatgtatgtgaaggagttccttatttcctcatcacaagatggccaccagtggaccctcttctttcagaatggtaaggtcaaagtgtttcagggcaatcaagacagcttcacacccgtggtgaacagtcttgatcctccactcttgacacgataccttcgaatccatccacagtcttgggttcaccagattgcattgcgcatggaagtacttggatgcgaggctcaggacctctac

SEQ ID NO: 2738 - protein, 1457 aa, synthetic construct
  REGION 1..1457: note = Variant of human B-domain deleted Factor VIII
MQIELSTCFFLCLLRFCFSATRRYYLGAVELSWDYMQSDLGELPVDARFPPRVPKSFPFNTSVVYKKTLFVEFTDHLFNIAKPRPPWMGLLGPTIQAEVYDTVVITLKNMASHPVSLHAVGVSYWKASEGAEYDDQTSQREKEDDKVFPGGSHTYVWQVLKENGPMASDPWCLTYSYLSHVDLVKDLNSGLIGALLVCREGSLAKEKTQTLHKFILLFAVFDEGKSWHSETKNSLMQDRDAASARAWPKMHTVNGYVNRSLPGLIGCHRKSVYWHVIGMGTTPEVHSIFLEGHTFLVRNHRQASLEISPITFLTAQTLLMDLGQFLLFCHISSHQHDGMEAYVKVDSCPEEPQLRMKNNEEAEDYDDDLTDSEMDVVRFDDDNSPSFIQIRSVAKKHPKTWVHYIAAEEEDWDYAPLVLAPDDRSYKSQYLNNGPQRIGRKYKKVRFMAYTDETFKTREAIQHESGILGPLLYGEVGDTLLIIFKNQASRPYNIYPHGITDVRPLYSRRLPKGVKHLKDFPILPGEIFKYKWTVTVEDGPTKSDPRCLTRYYSSFVNMERDLASGLIGPLLICYKESVDQRGNQIMSDKRNVILFSVFDENRSWYLTENIQRFLPNPAGVQLEDPEFQASNIMHSINGYVFDSLQLSVCLHEVAYWYILSIGAQTDFLSVFFSGYTFKHKMVYEDTLTLFPFSGETVFMSMENPGLWILGCHNSDFRNRGMTALLKVSSCDKNTGDYYEDSYEDISAYLLSKNNAIEPRSFSQNPPVLKRHQREITRTTLQSDQEEIDYDDTISVEMKKEDFDIYDEDENQSPRSFQKKTRHYFIAAVERLWDYGMSSSPHVLRNRAQSGSVPQFKKVVFQEFTDGSFTQPLYRGELNEHLGLLGPYIRAEVEDNIMVTFRNQASRPYSFYSSLISYEEDQRQGAEPRKNFVKPNETKTYFWKVQHHMAPTKDEFDCKAWAYFSDVDLEKDVHSGLIGPLLVCHTNTLNPAHGRQVTVQEFALFFTIFDETKSWYFTENMERNCRAPCNIQMEDPTFKENYRFHAINGYIMDTLPGLVMAQDQRIRWYLLSMGSNENIHSIHFSGHVFTVRKKEEYKMALYNLYPGVFETVEMLPSKAGIWRVECLIGEHLHAGMSTLFLVYSNKCQTPLGMASGHIRDFQITASGQYGQWAPKLARLHYSGSINAWSTKEPFSWIKVDLLAPMIIHGIKTQGARQKFSSLYISQFIIMYSLDGKKWQTYRGNSTGTLMVFFGNVDSSGIKHNIFNPPIIARYIRLHPTHYSIRSTLRMELMGCDLNSCSMPLGMESKAISDAQITASSYFTNMFATWSPSKARLHLQGRSNAWRPQVNNPKEWLQVDFQKTMKVTGVTTQGVKSLLTSMYVKEFLISSSQDGHQWTLFFQNGKVKVFQGNQDSFTPVVNSLDPPLLTRYLRIHPQSWVHQIALRMEVLGCEAQDLY

SEQ ID NO: 2739 - DNA, 4371 bp, synthetic construct
  misc_feature 1..4371: note = Variant of human B-domain deleted Factor VIII
  source 1..4371: mol_type = other DNA
atgcagattgaactgtctacctgcttcttcctctgtttgctgaggttctgctttagcgccactagacggtactaccttggcgctgtggagctgtcctgggactatatgcagagtgatttgggagagcttcccgtcgacgcacgatttcctcctcgcgttccaaagtcatttcccttcaacacaagcgtggtgtacaagaagacgctcttcgtcgaattcaccgatcacctgttcaatatcgccaaacccagaccaccatggatgggtcttttggggcctaccatacaagcggaggtgtatgacacagttgttatcactctcaagaacatggcttctcatccggtaagtcttcacgcagtgggcgtgtcctactggaaagcttcagaaggagccgagtatgatgatcagacatcccagagggagaaagaagacgacaaggtatttccaggtgggtctcatacctatgtgtggcaagtgctcaaagagaatggccctatggcaagcgatccgctctgtttgacttacagctacctttcacacgttgacctcgtcaaggacctcaactccgggttgattggagccttgttggtatgcagggaaggatctcttgccaaagagaagacacagaccctccacaagtttatccttctctttgctgtgttcgatgagggcaaaagttggcatagcgaaacgaagaattccctcatgcaggatcgcgacgcagccagcgccagagcttggcccaagatgcacactgtgaacggatatgtcaataggtcacttcctggcttgattgggtgtcatcggaaaagtgtctactggcacgtgatcggaatggggacaacaccagaggtccactccatatttctcgaaggccataccttccttgttcgaaaccacagacaggcatccttggagatctctcccattacctttctcactgcccaaacgctccttatggacttgggtcagttccttctcttctgccatatcagctcacaccagcatgatggtatggaagcttatgtgaaagtcgacagttgtcctgaggagccacagttgcgcatgaagaataatgaagaagccgaggattacgacgacgatctcaccgattctgagatggacgtggtgaggtttgatgacgacaactctccctccttcattcaaatccggagcgtggcgaagaaacaccccaagacttgggtccactatatagcggcggaagaggaggattgggattacgctcctcttgtattggcaccagatgaccgctcatacaaaagccagtacctcaacaacggaccgcagagaattggccggaagtataagaaagtgcgatttatggcctatacagacgaaacctttaagacaagggaggccatccagcatgagagtgggattttgggacctcttctttacggcgaagttggtgataccctcctcatcatcttcaagaatcaagcttctcgcccctataacatttacccacacgggatcactgacgttaggcctttgtatagcagaagacttcccaaaggcgtgaagcatctcaaagacttccccattttgccaggcgagatctttaagtacaaatggaccgtcacagtggaagatggaccgactaaatcagaccctcgatgccttacgcggtactattcctccttcgtgaatatggagagagatttggcaagcggactcataggaccactcctcatctgttacaaggaatctgtagaccagaggggtaaccagattatgagtgataaacgcaatgtgatccttttcagcgtcttcgacgagaaccggtcctggtacttgaccgagaatatacaaaggttccttcccaaccccgcaggcgttcagttggaagaccctgagtttcaggccagcaatattatgcactcaatcaacggctatgtgtttgatagtctccagctttctgtttgcctccatgaagtagcctattggtacatcttgtcaattggtgctcaaacagacttcctctccgtcttcttctccggctacacctttaagcacaagatggtgtatgaggacactctcacactctttccattttctggagaaaccgtgttcatgagcatggagaatccaggcctttggatcttgggttgccacaacagtgattttcgcaatcggggaatgactgctctcctcaaagtcagcagctgtgattataacacaggcgactattacgaagattcttacgaggacataagtgcctacttgttgtccaagaataacgccattgagcccagatcattctcccagaatcctcccgtgcttaaaaggcatcagcgcgaaatcaccagaactactcttcagtctgatcaagaggagattgactatgacgacaccataagcgtggaaatgaagaaggaggatttcgatatctatgacgaagatgagaaccagtctccgcggagctttcagaagaagacgcgacactacttcattgcagcagtcgaaaggctttgggactacggtatgtcatcatcccctcatgtgttgcgcaatagagctcagagtggaagtgttccacagttcaagaaagtcgtctttcaagagtttacagatggcagcttcacacagcctctctatcggggcgagcttaacgaacatttgggactccttggtccctatatccgagccgaagtggaggacaacattatggttacctttaggaatcaagcctctcgcccctacagcttctactcctccctcatcagttatgaggaggatcagagacaaggcgctgaaccacggaagaactttgtgaaaccgaatgagacgaagacctacttctggaaagtacagcaccacatggcccccacaaaagacgaattcgattgcaaagcatgggcgtatttttcagacgttgacttggagaaagatgtacattcaggacttattggtcctttgttggtgtgtcacactaacactctcaatccagcccatggcaggcaggtgacagtccaggaattcgctcttttctttaccatctttgatgagaccaagtcctggtacttcacggaaaacatggagcgcaattgcagagccccctgtaacatacagatggaggaccctacctttaaggaaaattatcggttccacgcaatcaacggatacattatggatacactccctggccttgtgatggctcaggaccaacgaatcaggtggtacctcctcagcatgggttctaatgagaacatacactccattcacttttcaggacatgtgttcactgtccggaagaaagaagagtataagatggccctctacaatttgtatccaggcgtgtttgagaccgttgaaatgcttccctctaaagctggcatctggagagtagagtgcttgatcggagaacatcttcacgcaggtatgagcaccttgttcctcgtgtacagcaacaaatgtcagaccccacttggcatggccagtggacacattcgcgactttcagatcacagcatctggccagtatggacaatgggccccaaagttggctcgcctccattactccggtagcataaatgcgtggtccactaaagaacctttcagctggattaaggtcgatcttcttgcccccatgatcatccacggcattaagacacagggagcgaggcagaaattctcctccctctacatctcacagttcattattatgtatagtttggacggcaagaagtggcaaacttatagaggtaacagtactggaacactcatggtgttcttcggcaacgttgatagctctggcatcaaacacaacatctttaatcctcccataatagctcggtacatcagattgcatccgacccactacagcattaggagtacactccgaatggagcttatgggttgcgacttgaattcctgttcaatgccactcggaatggagtctaaagccatctctgatgcacagataaccgccagtagctactttacgaacatgtttgctacgtggtcaccctctaaggcaaggcttcatttgcaaggccggtctaatgcctggagacctcaggtgaacaacccgaaagaatggctccaggtggactttcagaagaccatgaaagtaacaggtgtcactactcagggagttaagtccttgctcaccagcatgtatgtgaaggagttccttatttcctcatcacaagatggccaccagtggaccctcttctttcagaatggtaaggtcaaagtgtttcagggcaatcaagacagcttcacacccgtggtgaacagtcttgatcctccactcttgacacgataccttcgaatccatccacagtcttgggttcaccagattgcattgcgcatggaagtacttggatgcgaggctcaggacctctac

SEQ ID NO: 2740 - protein, 1457 aa, synthetic construct
  REGION 1..1457: note = Variant of human B-domain deleted Factor VIII
MQIELSTCFFLCLLRFCFSATRRYYLGAVELSWDYMQSDLGELPVDARFPPRVPKSFPFNTSVVYKKTLFVEFTDHLFNIAKPRPPWMGLLGPTIQAEVYDTVVITLKNMASHPVSLHAVGVSYWKASEGAEYDDQTSQREKEDDKVFPGGSHTYVWQVLKENGPMASDPLCLTYSYLSHVDLVKDLNSGLIGALLVCREGSLAKEKTQTLHKFILLFAVFDEGKSWHSETKNSLMQDRDAASARAWPKMHTVNGYVNRSLPGLIGCHRKSVYWHVIGMGTTPEVHSIFLEGHTFLVRNHRQASLEISPITFLTAQTLLMDLGQFLLFCHISSHQHDGMEAYVKVDSCPEEPQLRMKNNEEAEDYDDDLTDSEMDVVRFDDDNSPSFIQIRSVAKKHPKTWVHYIAAEEEDWDYAPLVLAPDDRSYKSQYLNNGPQRIGRKYKKVRFMAYTDETFKTREAIQHESGILGPLLYGEVGDTLLIIFKNQASRPYNIYPHGITDVRPLYSRRLPKGVKHLKDFPILPGEIFKYKWTVTVEDGPTKSDPRCLTRYYSSFVNMERDLASGLIGPLLICYKESVDQRGNQIMSDKRNVILFSVFDENRSWYLTENIQRFLPNPAGVQLEDPEFQASNIMHSINGYVFDSLQLSVCLHEVAYWYILSIGAQTDFLSVFFSGYTFKHKMVYEDTLTLFPFSGETVFMSMENPGLWILGCHNSDFRNRGMTALLKVSSCDYNTGDYYEDSYEDISAYLLSKNNAIEPRSFSQNPPVLKRHQREITRTTLQSDQEEIDYDDTISVEMKKEDFDIYDEDENQSPRSFQKKTRHYFIAAVERLWDYGMSSSPHVLRNRAQSGSVPQFKKVVFQEFTDGSFTQPLYRGELNEHLGLLGPYIRAEVEDNIMVTFRNQASRPYSFYSSLISYEEDQRQGAEPRKNFVKPNETKTYFWKVQHHMAPTKDEFDCKAWAYFSDVDLEKDVHSGLIGPLLVCHTNTLNPAHGRQVTVQEFALFFTIFDETKSWYFTENMERNCRAPCNIQMEDPTFKENYRFHAINGYIMDTLPGLVMAQDQRIRWYLLSMGSNENIHSIHFSGHVFTVRKKEEYKMALYNLYPGVFETVEMLPSKAGIWRVECLIGEHLHAGMSTLFLVYSNKCQTPLGMASGHIRDFQITASGQYGQWAPKLARLHYSGSINAWSTKEPFSWIKVDLLAPMIIHGIKTQGARQKFSSLYISQFIIMYSLDGKKWQTYRGNSTGTLMVFFGNVDSSGIKHNIFNPPIIARYIRLHPTHYSIRSTLRMELMGCDLNSCSMPLGMESKAISDAQITASSYFTNMFATWSPSKARLHLQGRSNAWRPQVNNPKEWLQVDFQKTMKVTGVTTQGVKSLLTSMYVKEFLISSSQDGHQWTLFFQNGKVKVFQGNQDSFTPVVNSLDPPLLTRYLRIHPQSWVHQIALRMEVLGCEAQDLY

SEQ ID NO: 2741 - DNA, 4371 bp, synthetic construct
  misc_feature 1..4371: note = Variant of human B-domain deleted Factor VIII
  source 1..4371: mol_type = other DNA
atgcagattgaactgtctacctgcttcttcctctgtttgctgaggttctgctttagcgccactagacggtactaccttggcgctgtggagctgtcctgggactatatgcagagtgatttgggagagcttcccgtcgacgcacgatttcctcctcgcgttccaaagtcatttcccttcaacacaagcgtggtgtacaagaagacgctcttcgtcgaattcaccgatcacctgttcaatatcgccaaacccagaccaccatggatgggtcttttggggcctaccatacaagcggaggtgtatgacacagttgttatcactctcaagaacatggcttctcatccggtaagtcttcacgcagtgggcgtgtcctactggaaagcttcagaaggagccgagtatgatgatcagacatcccagagggagaaagaagacgacaaggtatttccaggtgggtctcatacctatgtgtggcaagtgctcaaagagaatggccctatggcaagcgatccgacttgtttgacttacagctacctttcacacgttgacctcgtcaaggacctcaactccgggttgattggagccttgttggtatgcagggaaggatctcttgccaaagagaagacacagaccctccacaagtttatccttctctttgctgtgttcgatgagggcaaaagttggcatagcgaaacgaagaattccctcatgcaggatcgcgacgcagccagcgccagagcttggcccaagatgcacactgtgaacggatatgtcaataggtcacttcctggcttgattgggtgtcatcggaaaagtgtctactggcacgtgatcggaatggggacaacaccagaggtccactccatatttctcgaaggccataccttccttgttcgaaaccacagacaggcatccttggagatctctcccattacctttctcactgcccaaacgctccttatggacttgggtcagttccttctcttctgccatatcagctcacaccagcatgatggtatggaagcttatgtgaaagtcgacagttgtcctgaggagccacagttgcgcatgaagaataatgaagaagccgaggattacgacgacgatctcaccgattctgagatggacgtggtgaggtttgatgacgacaactctccctccttcattcaaatccggagcgtggcgaagaaacaccccaagacttgggtccactatatagcggcggaagaggaggattgggattacgctcctcttgtattggcaccagatgaccgctcatacaaaagccagtacctcaacaacggaccgcagagaattggccggaagtataagaaagtgcgatttatggcctatacagacgaaacctttaagacaagggaggccatccagcatgagagtgggattttgggacctcttctttacggcgaagttggtgataccctcctcatcatcttcaagaatcaagcttctcgcccctataacatttacccacacgggatcactgacgttaggcctttgtatagcagaagacttcccaaaggcgtgaagcatctcaaagacttccccattttgccaggcgagatctttaagtacaaatggaccgtcacagtggaagatggaccgactaaatcagaccctcgatgccttacgcggtactattcctccttcgtgaatatggagagagatttggcaagcggactcataggaccactcctcatctgttacaaggaatctgtagaccagaggggtaaccagattatgagtgataaacgcaatgtgatcctttttagcgtcttcgacgagaaccggtcctggtacttgaccgagaatatacaaaggttccttcccaaccccgcaggcgttcagttggaagaccctgagtttcaggccagcaatattatgcactcaatcaacggctatgtgtttgatagtctccagctttctgtttgcctccatgaagtagcctattggtacatcttgtcaattggtgctcaaacagacttcctctccgtcttcttctccggctacacctttaagcacaagatggtgtatgaggacactctcacactctttccattttctggagaaaccgtgttcatgagcatggagaatccaggcctttggatcttgggttgccacaacagtgattttcgcaatcggggaatgactgctctcctcaaagtcagcagctgtgataagaacacaggcgactattacgaagattcttacgaggacataagtgcctacttgttgtccaagaataacgccattgagcccagatcattctcccagaatcctcccgtgcttaaaaggcatcagcgcgaaatcaccagaactactcttcagtctgatcaagaggagattgactatgacgacaccataagcgtggaaatgaagaaggaggatttcgatatctatgacgaagatgagaaccagtctccgcggagctttcagaagaagacgcgacactacttcattgcagcagtcgaaaggctttgggactacggtatgtcatcatcccctcatgtgttgcgcaatagagctcagagtggaagtgttccacagttcaagaaagtcgtctttcaagagtttacagatggcagcttcacacagcctctctatcggggcgagcttaacgaacatttgggactccttggtccctatatccgagccgaagtggaggacaacattatggttacctttaggaatcaagcctctcgcccctacagcttctactcctccctcatcagttatgaggaggatcagagacaaggcgctgaaccacggaagaactttgtgaaaccgaatgagacgaagacctacttctggaaagtacagcaccacatggcccccacaaaagacgaattcgattgcaaagcatgggcgtatttttcagacgttgacttggagaaagatgtacattcaggacttattggtcctttgttggtgtgtcacactaacactctcaatccagcccatggcaggcaggtgacagtccaggaattcgctcttttctttaccatctttgatgagaccaagtcctggtacttcacggaaaacatggagcgcaattgcagagccccctgtaacatacagatggaggaccctacctttaaggaaaattatcggttccacgcaatcaacggatacattatggatacactccctggccttgtgatggctcaggaccaacgaatcaggtggtacctcctcagcatgggttctaatgagaacatacactccattcacttttcaggacatgtgttcactgtccggaagaaagaagagtataagatggccctctacaatttgtatccaggcgtgtttgagaccgttgaaatgcttccctctaaagctggcatctggagagtagagtgcttgatcggagaacatcttcacgcaggtatgagcaccttgttcctcgtgtacagcaacaaatgtcagaccccacttggcatggccagtggacacattcgcgactttcagatcacagcatctggccagtatggacaatgggccccaaagttggctcgcctccattactccggtagcataaatgcgtggtccactaaagaacctttcagctggattaaggtcgatcttcttgcccccatgatcatccacggcattaagacacagggagcgaggcagaaattctcctccctctacatctcacagttcattattatgtatagtttggacggcaagaagtggcaaacttatagaggtaacagtactggaacactcatggtgttcttcggcaacgttgatagctctggcatcaaacacaacatctttaatcctcccataatagctcggtacatcagattgcatccgacccactacagcattaggagtacactccgaatggagcttatgggttgcgacttgaattcctgttcaatgccactcggaatggagtctaaagccatctctgatgcacagataaccgccagtagctactttacgaacatgtttgctacgtggtcaccctctaaggcaaggcttcatttgcaaggccggtctaatgcctggagacctcaggtgaacaacccgaaagaatggctccaggtggactttcagaagaccatgaaagtaacaggtgtcactactcagggagttaagtccttgctcaccagcatgtatgtgaaggagttccttatttcctcatcacaagatggccaccagtggaccctcttctttcagaatggtaaggtcaaagtgtttcagggcaatcaagacagcttcacacccgtggtgaacagtcttgatcctccactcttgacacgataccttcgaatccatccacagtcttgggttcaccagattgcattgcgcatggaagtacttggatgcgaggctcaggacctctac

SEQ ID NO: 2742 - protein, 1457 aa, synthetic construct
  REGION 1..1457: note = Variant of human B-domain deleted Factor VIII
MQIELSTCFFLCLLRFCFSATRRYYLGAVELSWDYMQSDLGELPVDARFPPRVPKSFPFNTSVVYKKTLFVEFTDHLFNIAKPRPPWMGLLGPTIQAEVYDTVVITLKNMASHPVSLHAVGVSYWKASEGAEYDDQTSQREKEDDKVFPGGSHTYVWQVLKENGPMASDPTCLTYSYLSHVDLVKDLNSGLIGALLVCREGSLAKEKTQTLHKFILLFAVFDEGKSWHSETKNSLMQDRDAASARAWPKMHTVNGYVNRSLPGLIGCHRKSVYWHVIGMGTTPEVHSIFLEGHTFLVRNHRQASLEISPITFLTAQTLLMDLGQFLLFCHISSHQHDGMEAYVKVDSCPEEPQLRMKNNEEAEDYDDDLTDSEMDVVRFDDDNSPSFIQIRSVAKKHPKTWVHYIAAEEEDWDYAPLVLAPDDRSYKSQYLNNGPQRIGRKYKKVRFMAYTDETFKTREAIQHESGILGPLLYGEVGDTLLIIFKNQASRPYNIYPHGITDVRPLYSRRLPKGVKHLKDFPILPGEIFKYKWTVTVEDGPTKSDPRCLTRYYSSFVNMERDLASGLIGPLLICYKESVDQRGNQIMSDKRNVILFSVFDENRSWYLTENIQRFLPNPAGVQLEDPEFQASNIMHSINGYVFDSLQLSVCLHEVAYWYILSIGAQTDFLSVFFSGYTFKHKMVYEDTLTLFPFSGETVFMSMENPGLWILGCHNSDFRNRGMTALLKVSSCDKNTGDYYEDSYEDISAYLLSKNNAIEPRSFSQNPPVLKRHQREITRTTLQSDQEEIDYDDTISVEMKKEDFDIYDEDENQSPRSFQKKTRHYFIAAVERLWDYGMSSSPHVLRNRAQSGSVPQFKKVVFQEFTDGSFTQPLYRGELNEHLGLLGPYIRAEVEDNIMVTFRNQASRPYSFYSSLISYEEDQRQGAEPRKNFVKPNETKTYFWKVQHHMAPTKDEFDCKAWAYFSDVDLEKDVHSGLIGPLLVCHTNTLNPAHGRQVTVQEFALFFTIFDETKSWYFTENMERNCRAPCNIQMEDPTFKENYRFHAINGYIMDTLPGLVMAQDQRIRWYLLSMGSNENIHSIHFSGHVFTVRKKEEYKMALYNLYPGVFETVEMLPSKAGIWRVECLIGEHLHAGMSTLFLVYSNKCQTPLGMASGHIRDFQITASGQYGQWAPKLARLHYSGSINAWSTKEPFSWIKVDLLAPMIIHGIKTQGARQKFSSLYISQFIIMYSLDGKKWQTYRGNSTGTLMVFFGNVDSSGIKHNIFNPPIIARYIRLHPTHYSIRSTLRMELMGCDLNSCSMPLGMESKAISDAQITASSYFTNMFATWSPSKARLHLQGRSNAWRPQVNNPKEWLQVDFQKTMKVTGVTTQGVKSLLTSMYVKEFLISSSQDGHQWTLFFQNGKVKVFQGNQDSFTPVVNSLDPPLLTRYLRIHPQSWVHQIALRMEVLGCEAQDLY

SEQ ID NO: 2743 - DNA, 4371 bp, synthetic construct
  misc_feature 1..4371: note = Variant of human B-domain deleted Factor VIII
  source 1..4371: mol_type = other DNA
atgcagattgaactgtctacctgcttcttcctctgtttgctgaggttctgctttagcgccactagacggtactaccttggcgctgtggagctgtcctgggactatatgcagagtgatttgggagagcttcccgtcgacgcacgatttcctcctcgcgttccaaagtcatttcccttcaacacaagcgtggtgtacaagaagacgctcttcgtcgaattcaccgatcacctgttcaatatcgccaaacccagaccaccatggatgggtcttttggggcctaccatacaagcggaggtgtatgacacagttgttatcactctcaagaacatggcttctcatccggtaagtcttcacgcagtgggcgtgtcctactggaaagcttcagaaggagccgagtatgatgatcagacatcccagagggagaaagaagacgacaaggtatttccaggtgggtctcatacctatgtgtggcaagtgctcaaagagaatggccctatggcaagcgatccgctctgtttgacttacagctacctttcacacgttgacctcgtcaaggacctcaactccgggttgattggagccttgttggtatgcagggaaggatctcttgccaaagagaagacacagaccctccacaagtttatccttctctttgctgtgttcgatgagggcaaaagttggcatagcgaaacgaagaattccctcatgcaggatcgcgacgcagccagcgccagagcttggcccaagatgcacactgtgaacggatatgtcaataggtcacttcctggcttgattgggtgtcatcggaaaagtgtctactggcacgtgatcggaatggggacaacaccagaggtccactccatatttctcgaaggccataccttccttgttcgaaaccacagacaggcatccttggagatctctcccattacctttctcactgcccaaacgctccttatggacttgggtcagttccttctcttctgccatatcagctcacaccagcatgatggtatggaagcttatgtgaaagtcgacagttgtcctgaggagccacagttgcgcatgaagaataatgaagaagccgaggattacgacgacgatctcaccgattctgagatggacgtggtgaggtttgatgacgacaactctccctccttcattcaaatccggagcgtggcgaagaaacaccccaagacttgggtccactatatagcggcggaagaggaggattgggattacgctcctcttgtattggcaccagatgaccgctcatacaaaagccagtacctcaacaacggaccgcagagaattggccggaagtataagaaagtgcgatttatggcctatacagacgaaacctttaagacaagggaggccatccagcatgagagtgggattttgggacctcttctttacggcgaagttggtgataccctcctcatcatcttcaagaatcaagcttctcgcccctataacatttacccacacgggatcactgacgttaggcctttgtatagcagaagacttcccaaaggcgtgaagcatctcaaagacttccccattttgccaggcgagatctttaagtacaaatggaccgtcacagtggaagatggaccgactaaatcagaccctcgatgccttacgcggtactattcctccttcgtgaatatggagagagatttggcaagcggactcataggaccactcctcatctgttacaaggaatctgtagaccagaggggtaaccagattatgagtgataaacgcaatgtgatcctttttagcgtcttcgacgagaaccggtcctggtacttgaccgagaatatacaaaggttccttcccaaccccgcaggcgttcagttggaagaccctgagtttcaggccagcaatattatgcactcaatcaacggctatgtgtttgatagtctccagctttctgtttgcctccatgaagtagcctattggtacatcttgtcaattggtgctcaaacagacttcctctccgtcttcttctccggctacacctttaagcacaagatggtgtatgaggacactctcacactctttccattttctggagaaaccgtgttcatgagcatggagaatccaggcctttggatcttgggttgccacaacagtgattttcgcaatcggggaatgactgctctcctcaaagtcagcagctgtgataagaacacaggcgactattacgaagattcttacgaggacataagtgcctacttgttgtccaagaataacgccattgagcccagatcattctcccagaatcctcccgtgcttaaaaggcatcagcgcgaaatcaccagaactactcttcagtctgatcaagaggagattgactatgacgacaccataagcgtggaaatgaagaaggaggatttcgatatctgggacgaagatgagaaccagtctccgcggagctttcagaagaagacgcgacactacttcattgcagcagtcgaaaggctttgggactacggtatgtcatcatcccctcatgtgttgcgcaatagagctcagagtggaagtgttccacagttcaagaaagtcgtctttcaagagtttacagatggcagcttcacacagcctctctatcggggcgagcttaacgaacatttgggactccttggtccctatatccgagccgaagtggaggacaacattatggttacctttaggaatcaagcctctcgcccctacagcttctactcctccctcatcagttatgaggaggatcagagacaaggcgctgaaccacggaagaactttgtgaaaccgaatgagacgaagacctacttctggaaagtacagcaccacatggcccccacaaaagacgaattcgattgcaaagcatgggcgtatttttcagacgttgacttggagaaagatgtacattcaggacttattggtcctttgttggtgtgtcacactaacactctcaatccagcccatggcaggcaggtgacagtccaggaattcgctcttttctttaccatctttgatgagaccaagtcctggtacttcacggaaaacatggagcgcaattgcagagccccctgtaacatacagatggaggaccctacctttaaggaaaattatcggttccacgcaatcaacggatacattatggatacactccctggccttgtgatggctcaggaccaacgaatcaggtggtacctcctcagcatgggttctaatgagaacatacactccattcacttttcaggacatgtgttcactgtccggaagaaagaagagtataagatggccctctacaatttgtatccaggcgtgtttgagaccgttgaaatgcttccctctaaagctggcatctggagagtagagtgcttgatcggagaacatcttcacgcaggtatgagcaccttgttcctcgtgtacagcaacaaatgtcagaccccacttggcatggccagtggacacattcgcgactttcagatcacagcatctggccagtatggacaatgggccccaaagttggctcgcctccattactccggtagcataaatgcgtggtccactaaagaacctttcagctggattaaggtcgatcttcttgcccccatgatcatccacggcattaagacacagggagcgaggcagaaattctcctccctctacatctcacagttcattattatgtatagtttggacggcaagaagtggcaaacttatagaggtaacagtactggaacactcatggtgttcttcggcaacgttgatagctctggcatcaaacacaacatctttaatcctcccataatagctcggtacatcagattgcatccgacccactacagcattaggagtacactccgaatggagcttatgggttgcgacttgaattcctgttcaatgccactcggaatggagtctaaagccatctctgatgcacagataaccgccagtagctactttacgaacatgtttgctacgtggtcaccctctaaggcaaggcttcatttgcaaggccggtctaatgcctggagacctcaggtgaacaacccgaaagaatggctccaggtggactttcagaagaccatgaaagtaacaggtgtcactactcagggagttaagtccttgctcaccagcatgtatgtgaaggagttccttatttcctcatcacaagatggccaccagtggaccctcttctttcagaatggtaaggtcaaagtgtttcagggcaatcaagacagcttcacacccgtggtgaacagtcttgatcctccactcttgacacgataccttcgaatccatccacagtcttgggttcaccagattgcattgcgcatggaagtacttggatgcgaggctcaggacctctac

SEQ ID NO: 2744 - protein, 1457 aa, synthetic construct
  REGION 1..1457: note = Variant of human B-domain deleted Factor VIII
MQIELSTCFFLCLLRFCFSATRRYYLGAVELSWDYMQSDLGELPVDARFPPRVPKSFPFNTSVVYKKTLFVEFTDHLFNIAKPRPPWMGLLGPTIQAEVYDTVVITLKNMASHPVSLHAVGVSYWKASEGAEYDDQTSQREKEDDKVFPGGSHTYVWQVLKENGPMASDPLCLTYSYLSHVDLVKDLNSGLIGALLVCREGSLAKEKTQTLHKFILLFAVFDEGKSWHSETKNSLMQDRDAASARAWPKMHTVNGYVNRSLPGLIGCHRKSVYWHVIGMGTTPEVHSIFLEGHTFLVRNHRQASLEISPITFLTAQTLLMDLGQFLLFCHISSHQHDGMEAYVKVDSCPEEPQLRMKNNEEAEDYDDDLTDSEMDVVRFDDDNSPSFIQIRSVAKKHPKTWVHYIAAEEEDWDYAPLVLAPDDRSYKSQYLNNGPQRIGRKYKKVRFMAYTDETFKTREAIQHESGILGPLLYGEVGDTLLIIFKNQASRPYNIYPHGITDVRPLYSRRLPKGVKHLKDFPILPGEIFKYKWTVTVEDGPTKSDPRCLTRYYSSFVNMERDLASGLIGPLLICYKESVDQRGNQIMSDKRNVILFSVFDENRSWYLTENIQRFLPNPAGVQLEDPEFQASNIMHSINGYVFDSLQLSVCLHEVAYWYILSIGAQTDFLSVFFSGYTFKHKMVYEDTLTLFPFSGETVFMSMENPGLWILGCHNSDFRNRGMTALLKVSSCDKNTGDYYEDSYEDISAYLLSKNNAIEPRSFSQNPPVLKRHQREITRTTLQSDQEEIDYDDTISVEMKKEDFDIWDEDENQSPRSFQKKTRHYFIAAVERLWDYGMSSSPHVLRNRAQSGSVPQFKKVVFQEFTDGSFTQPLYRGELNEHLGLLGPYIRAEVEDNIMVTFRNQASRPYSFYSSLISYEEDQRQGAEPRKNFVKPNETKTYFWKVQHHMAPTKDEFDCKAWAYFSDVDLEKDVHSGLIGPLLVCHTNTLNPAHGRQVTVQEFALFFTIFDETKSWYFTENMERNCRAPCNIQMEDPTFKENYRFHAINGYIMDTLPGLVMAQDQRIRWYLLSMGSNENIHSIHFSGHVFTVRKKEEYKMALYNLYPGVFETVEMLPSKAGIWRVECLIGEHLHAGMSTLFLVYSNKCQTPLGMASGHIRDFQITASGQYGQWAPKLARLHYSGSINAWSTKEPFSWIKVDLLAPMIIHGIKTQGARQKFSSLYISQFIIMYSLDGKKWQTYRGNSTGTLMVFFGNVDSSGIKHNIFNPPIIARYIRLHPTHYSIRSTLRMELMGCDLNSCSMPLGMESKAISDAQITASSYFTNMFATWSPSKARLHLQGRSNAWRPQVNNPKEWLQVDFQKTMKVTGVTTQGVKSLLTSMYVKEFLISSSQDGHQWTLFFQNGKVKVFQGNQDSFTPVVNSLDPPLLTRYLRIHPQSWVHQIALRMEVLGCEAQDLY

SEQ ID NO: 2745 - DNA, 4371 bp, synthetic construct
  misc_feature 1..4371: note = Variant of human B-domain deleted Factor VIII
  source 1..4371: mol_type = other DNA
atgcagattgaactgtctacctgcttcttcctctgtttgctgaggttctgctttagcgccactagacggtactaccttggcgctgtggagctgtcctgggactatatgcagagtgatttgggagagcttcccgtcgacgcacgatttcctcctcgcgttccaaagtcatttcccttcaacacaagcgtggtgtacaagaagacgctcttcgtcgaattcaccgatcacctgttcaatatcgccaaacccagaccaccatggatgggtcttttggggcctaccatacaagcggaggtgtatgacacagttgttatcactctcaagaacatggcttctcatccggtaagtcttcacgcagtgggcgtgtcctactggaaagcttcagaaggagccgagtatgatgatcagacatcccagagggagaaagaagacgacaaggtatttccaggtgggtctcatacctatgtgtggcaagtgctcaaagagaatggccctatggcaagcgatccgctctgtttgacttacagctacctttcacacgttgacctcgtcaaggacctcaactccgggttgattggagccttgttggtatgcagggaaggatctcttgccaaagagaagacacagaccctccacaagtttatccttctctttgctgtgttcgatgagggcaaaagttggcatagcgaaacgaagaattccctcatgcaggatcgcgacgcagccagcgccagagcttggcccaagatgcacactgtgaacggatatgtcaataggtcacttcctggcttgattgggtgtcatcggaaaagtgtctactggcacgtgatcggaatggggacaacaccagaggtccactccatatttctcgaaggccataccttccttgttcgaaaccacagacaggcatccttggagatctctcccattacctttctcactgcccaaacgctccttatggacttgggtcagttccttctcttctgccatatcagctcacaccagcatgatggtatggaagcttatgtgaaagtcgacagttgtcctgaggagccacagttgcgcatgaagaataatgaagaagccgaggattacgacgacgatctcaccgattctgagatggacgtggtgaggtttgatgacgacaactctccctccttcattcaaatccggagcgtggcgaagaaacaccccaagacttgggtccactatatagcggcggaagaggaggattgggattacgctcctcttgtattggcaccagatgaccgctcatacaaaagccagtacctcaacaacggaccgcagagaattggccggaagtataagaaagtgcgatttatggcctatacagacgaaacctttaagacaagggaggccatccagcatgagagtgggattttgggacctcttctttacggcgaagttggtgataccctcctcatcatcttcaagaatcaagcttctcgcccctataacatttacccacacgggatcactgacgttaggcctttgtatagcagaagacttcccaaaggcgtgaagcatctcaaagacttccccattttgccaggcgagatctttaagtacaaatggaccgtcacagtggaagatggaccgactaaatcagaccctcgatgccttacgcggtactattcctccttcgtgaatatggagagagatttggcaagcggactcataggaccactcctcatctgttacaaggaatctgtagaccagaggggtaaccagattatgagtgataaacgcaatgtgatcctttttagcgtcttcgacgagaaccggtcctggtacttgaccgagaatatacaaaggttccttcccaaccccgcaggcgttcagttggaagaccctgagtttcaggccagcaatattatgcactcaatcaacggctatgtgtttgatagtctccagctttctgtttgcctccatgaagtagcctattggtacatcttgtcaattggtgctcaaacagacttcctctccgtcttcttctccggctacacctttaagcacaagatggtgtatgaggacactctcacactctttccattttctggagaaaccgtgttcatgagcatggagaatccaggcctttggatcttgggttgccacaacagtgattttcgcaatcggggaatgactgctctcctcaaagtcagcagctgtgataagaacacaggcgactattacgaagattcttacgaggacataagtgcctacttgttgtccaagaataacgccattgagcccagatcattctcccagaatcctcccgtgcttaaaaggcatcagcgcgaaatcaccagaactactcttcagtctgatcaagaggagattgactatgacgacaccataagcgtggaaatgaagaaggaggatttcgatatctatgacgaagatggtaaccagtctccgcggagctttcagaagaagacgcgacactacttcattgcagcagtcgaaaggctttgggactacggtatgtcatcatcccctcatgtgttgcgcaatagagctcagagtggaagtgttccacagttcaagaaagtcgtctttcaagagtttacagatggcagcttcacacagcctctctatcggggcgagcttaacgaacatttgggactccttggtccctatatccgagccgaagtggaggacaacattatggttacctttaggaatcaagcctctcgcccctacagcttctactcctccctcatcagttatgaggaggatcagagacaaggcgctgaaccacggaagaactttgtgaaaccgaatgagacgaagacctacttctggaaagtacagcaccacatggcccccacaaaagacgaattcgattgcaaagcatgggcgtatttttcagacgttgacttggagaaagatgtacattcaggacttattggtcctttgttggtgtgtcacactaacactctcaatccagcccatggcaggcaggtgacagtccaggaattcgctcttttctttaccatctttgatgagaccaagtcctggtacttcacggaaaacatggagcgcaattgcagagccccctgtaacatacagatggaggaccctacctttaaggaaaattatcggttccacgcaatcaacggatacattatggatacactccctggccttgtgatggctcaggaccaacgaatcaggtggtacctcctcagcatgggttctaatgagaacatacactccattcacttttcaggacatgtgttcactgtccggaagaaagaagagtataagatggccctctacaatttgtatccaggcgtgtttgagaccgttgaaatgcttccctctaaagctggcatctggagagtagagtgcttgatcggagaacatcttcacgcaggtatgagcaccttgttcctcgtgtacagcaacaaatgtcagaccccacttggcatggccagtggacacattcgcgactttcagatcacagcatctggccagtatggacaatgggccccaaagttggctcgcctccattactccggtagcataaatgcgtggtccactaaagaacctttcagctggattaaggtcgatcttcttgcccccatgatcatccacggcattaagacacagggagcgaggcagaaattctcctccctctacatctcacagttcattattatgtatagtttggacggcaagaagtggcaaacttatagaggtaacagtactggaacactcatggtgttcttcggcaacgttgatagctctggcatcaaacacaacatctttaatcctcccataatagctcggtacatcagattgcatccgacccactacagcattaggagtacactccgaatggagcttatgggttgcgacttgaattcctgttcaatgccactcggaatggagtctaaagccatctctgatgcacagataaccgccagtagctactttacgaacatgtttgctacgtggtcaccctctaaggcaaggcttcatttgcaaggccggtctaatgcctggagacctcaggtgaacaacccgaaagaatggctccaggtggactttcagaagaccatgaaagtaacaggtgtcactactcagggagttaagtccttgctcaccagcatgtatgtgaaggagttccttatttcctcatcacaagatggccaccagtggaccctcttctttcagaatggtaaggtcaaagtgtttcagggcaatcaagacagcttcacacccgtggtgaacagtcttgatcctccactcttgacacgataccttcgaatccatccacagtcttgggttcaccagattgcattgcgcatggaagtacttggatgcgaggctcaggacctctac

SEQ ID NO: 2746 - protein, 1457 aa, synthetic construct
  REGION 1..1457: note = Variant of human B-domain deleted Factor VIII
MQIELSTCFFLCLLRFCFSATRRYYLGAVELSWDYMQSDLGELPVDARFPPRVPKSFPFNTSVVYKKTLFVEFTDHLFNIAKPRPPWMGLLGPTIQAEVYDTVVITLKNMASHPVSLHAVGVSYWKASEGAEYDDQTSQREKEDDKVFPGGSHTYVWQVLKENGPMASDPLCLTYSYLSHVDLVKDLNSGLIGALLVCREGSLAKEKTQTLHKFILLFAVFDEGKSWHSETKNSLMQDRDAASARAWPKMHTVNGYVNRSLPGLIGCHRKSVYWHVIGMGTTPEVHSIFLEGHTFLVRNHRQASLEISPITFLTAQTLLMDLGQFLLFCHISSHQHDGMEAYVKVDSCPEEPQLRMKNNEEAEDYDDDLTDSEMDVVRFDDDNSPSFIQIRSVAKKHPKTWVHYIAAEEEDWDYAPLVLAPDDRSYKSQYLNNGPQRIGRKYKKVRFMAYTDETFKTREAIQHESGILGPLLYGEVGDTLLIIFKNQASRPYNIYPHGITDVRPLYSRRLPKGVKHLKDFPILPGEIFKYKWTVTVEDGPTKSDPRCLTRYYSSFVNMERDLASGLIGPLLICYKESVDQRGNQIMSDKRNVILFSVFDENRSWYLTENIQRFLPNPAGVQLEDPEFQASNIMHSINGYVFDSLQLSVCLHEVAYWYILSIGAQTDFLSVFFSGYTFKHKMVYEDTLTLFPFSGETVFMSMENPGLWILGCHNSDFRNRGMTALLKVSSCDKNTGDYYEDSYEDISAYLLSKNNAIEPRSFSQNPPVLKRHQREITRTTLQSDQEEIDYDDTISVEMKKEDFDIYDEDGNQSPRSFQKKTRHYFIAAVERLWDYGMSSSPHVLRNRAQSGSVPQFKKVVFQEFTDGSFTQPLYRGELNEHLGLLGPYIRAEVEDNIMVTFRNQASRPYSFYSSLISYEEDQRQGAEPRKNFVKPNETKTYFWKVQHHMAPTKDEFDCKAWAYFSDVDLEKDVHSGLIGPLLVCHTNTLNPAHGRQVTVQEFALFFTIFDETKSWYFTENMERNCRAPCNIQMEDPTFKENYRFHAINGYIMDTLPGLVMAQDQRIRWYLLSMGSNENIHSIHFSGHVFTVRKKEEYKMALYNLYPGVFETVEMLPSKAGIWRVECLIGEHLHAGMSTLFLVYSNKCQTPLGMASGHIRDFQITASGQYGQWAPKLARLHYSGSINAWSTKEPFSWIKVDLLAPMIIHGIKTQGARQKFSSLYISQFIIMYSLDGKKWQTYRGNSTGTLMVFFGNVDSSGIKHNIFNPPIIARYIRLHPTHYSIRSTLRMELMGCDLNSCSMPLGMESKAISDAQITASSYFTNMFATWSPSKARLHLQGRSNAWRPQVNNPKEWLQVDFQKTMKVTGVTTQGVKSLLTSMYVKEFLISSSQDGHQWTLFFQNGKVKVFQGNQDSFTPVVNSLDPPLLTRYLRIHPQSWVHQIALRMEVLGCEAQDLY

SEQ ID NO: 2747 - DNA, 4371 bp, synthetic construct
  misc_feature 1..4371: note = Variant of human B-domain deleted Factor VIII
  source 1..4371: mol_type = other DNA
atgcagattgaactgtctacctgcttcttcctctgtttgctgaggttctgctttagcgccactagacggtactaccttggcgctgtggagctgtcctgggactatatgcagagtgatttgggagagcttcccgtcgacgcacgatttcctcctcgcgttccaaagtcatttcccttcaacacaagcgtggtgtacaagaagacgctcttcgtcgaattcaccgatcacctgttcaatatcgccaaacccagaccaccatggatgggtcttttggggcctaccatacaagcggaggtgtatgacacagttgttatcactctcaagaacatggcttctcatccggtaagtcttcacgcagtgggcgtgtcctactggaaagcttcagaaggagccgagtatgatgatcagacatcccagagggagaaagaagacgacaaggtatttccaggtgggtctcatacctatgtgtggcaagtgctcaaagagaatggccctatggcaagcgatccgctctgtttgacttacagctacctttcacacgttgacctcgtcaaggacctcaactccgggttgattggagccttgttggtatgcagggaaggatctcttgccaaagagaagacacagaccctccacaagtttatccttctctttgctgtgttcgatgagggcaaaagttggcatagcgaaacgaagaattccctcatgcaggatcgcgacgcagccagcgccagagcttggcccaagatgcacactgtgaacggatatgtcaataggtcacttcctggcttgattgggtgtcatcggaaaagtgtctactggcacgtgatcggaatggggacaacaccagaggtccactccatatttctcgaaggccataccttccttgttcgaaaccacagacaggcatccttggagatctctcccattacctttctcactgcccaaacgctccttatggacttgggtcagttccttctcttctgccatatcagctcacaccagcatgatggtatggaagcttatgtgaaagtcgacagttgtcctgaggagccacagttgcgcatgaagaataatgaagaagccgaggattacgacgacgatctcaccgattctgagatggacgtggtgaggtttgatgacgacaactctccctccgttattcaaatccggagcgtggcgaagaaacaccccaagacttgggtccactatatagcggcggaagaggaggattgggattacgctcctcttgtattggcaccagatgaccgctcatacaaaagccagtacctcaacaacggaccgcagagaattggccggaagtataagaaagtgcgatttatggcctatacagacgaaacctttaagacaagggaggccatccagcatgagagtgggattttgggacctcttctttacggcgaagttggtgataccctcctcatcatcttcaagaatcaagcttctcgcccctataacatttacccacacgggatcactgacgttaggcctttgtatagcagaagacttcccaaaggcgtgaagcatctcaaagacttccccattttgccaggcgagatctttaagtacaaatggaccgtcacagtggaagatggaccgactaaatcagaccctcgatgccttacgcggtactattcctccttcgtgaatatggagagagatttggcaagcggactcataggaccactcctcatctgttacaaggaatctgtagaccagaggggtaaccagattatgagtgataaacgcaatgtgatcctttttagcgtcttcgacgagaaccggtcctggtacttgaccgagaatatacaaaggttccttcccaaccccgcaggcgttcagttggaagaccctgagtttcaggccagcaatattatgcactcaatcaacggctatgtgtttgatagtctccagctttctgtttgcctccatgaagtagcctattggtacatcttgtcaattggtgctcaaacagacttcctctccgtcttcttctccggctacacctttaagcacaagatggtgtatgaggacactctcacactctttccattttctggagaaaccgtgttcatgagcatggagaatccaggcctttggatcttgggttgccacaacagtgattttcgcaatcggggaatgactgctctcctcaaagtcagcagctgtgataagaacacaggcgactattacgaagattcttacgaggacataagtgcctacttgttgtccaagaataacgccattgagcccagatcattctcccagaatcctcccgtgcttaaaaggcatcagcgcgaaatcaccagaactactcttcagtctgatcaagaggagattgactatgacgacaccataagcgtggaaatgaagaaggaggatttcgatatctatgacgaagatgagaaccagtctccgcggagctttcagaagaagacgcgacactacttcattgcagcagtcgaaaggctttgggactacggtatgtcatcatcccctcatgtgttgcgcaatagagctcagagtggaagtgttccacagttcaagaaagtcgtctttcaagagtttacagatggcagcttcacacagcctctctatcggggcgagcttaacgaacatttgggactccttggtccctatatccgagccgaagtggaggacaacattatggttacctttaggaatcaagcctctcgcccctacagcttctactcctccctcatcagttatgaggaggatcagagacaaggcgctgaaccacggaagaactttgtgaaaccgaatgagacgaagacctacttctggaaagtacagcaccacatggcccccacaaaagacgaattcgattgcaaagcatgggcgtatttttcagacgttgacttggagaaagatgtacattcaggacttattggtcctttgttggtgtgtcacactaacactctcaatccagcccatggcaggcaggtgacagtccaggaattcgctcttttctttaccatctttgatgagaccaagtcctggtacttcacggaaaacatggagcgcaattgcagagccccctgtaacatacagatggaggaccctacctttaaggaaaattatcggttccacgcaatcaacggatacattatggatacactccctggccttgtgatggctcaggaccaacgaatcaggtggtacctcctcagcatgggttctaatgagaacatacactccattcacttttcaggacatgtgttcactgtccggaagaaagaagagtataagatggccctctacaatttgtatccaggcgtgtttgagaccgttgaaatgcttccctctaaagctggcatctggagagtagagtgcttgatcggagaacatcttcacgcaggtatgagcaccttgttcctcgtgtacagcaacaaatgtcagaccccacttggcatggccagtggacacattcgcgactttcagatcacagcatctggccagtatggacaatgggccccaaagttggctcgcctccattactccggtagcataaatgcgtggtccactaaagaacctttcagctggattaaggtcgatcttcttgcccccatgatcatccacggcattaagacacagggagcgaggcagaaattctcctccctctacatctcacagttcattattatgtatagtttggacggcaagaagtggcaaacttatagaggtaacagtactggaacactcatggtgttcttcggcaacgttgatagctctggcatcaaacacaacatctttaatcctcccataatagctcggtacatcagattgcatccgacccactacagcattaggagtacactccgaatggagcttatgggttgcgacttgaattcctgttcaatgccactcggaatggagtctaaagccatctctgatgcacagataaccgccagtagctactttacgaacatgtttgctacgtggtcaccctctaaggcaaggcttcatttgcaaggccggtctaatgcctggagacctcaggtgaacaacccgaaagaatggctccaggtggactttcagaagaccatgaaagtaacaggtgtcactactcagggagttaagtccttgctcaccagcatgtatgtgaaggagttccttatttcctcatcacaagatggccaccagtggaccctcttctttcagaatggtaaggtcaaagtgtttcagggcaatcaagacagcttcacacccgtggtgaacagtcttgatcctccactcttgacacgataccttcgaatccatccacagtcttgggttcaccagattgcattgcgcatggaagtacttggatgcgaggctcaggacctctac

SEQ ID NO: 2748 - protein, 1457 aa, synthetic construct
  REGION 1..1457: note = Variant of human B-domain deleted Factor VIII
MQIELSTCFFLCLLRFCFSATRRYYLGAVELSWDYMQSDLGELPVDARFPPRVPKSFPFNTSVVYKKTLFVEFTDHLFNIAKPRPPWMGLLGPTIQAEVYDTVVITLKNMASHPVSLHAVGVSYWKASEGAEYDDQTSQREKEDDKVFPGGSHTYVWQVLKENGPMASDPLCLTYSYLSHVDLVKDLNSGLIGALLVCREGSLAKEKTQTLHKFILLFAVFDEGKSWHSETKNSLMQDRDAASARAWPKMHTVNGYVNRSLPGLIGCHRKSVYWHVIGMGTTPEVHSIFLEGHTFLVRNHRQASLEISPITFLTAQTLLMDLGQFLLFCHISSHQHDGMEAYVKVDSCPEEPQLRMKNNEEAEDYDDDLTDSEMDVVRFDDDNSPSVIQIRSVAKKHPKTWVHYIAAEEEDWDYAPLVLAPDDRSYKSQYLNNGPQRIGRKYKKVRFMAYTDETFKTREAIQHESGILGPLLYGEVGDTLLIIFKNQASRPYNIYPHGITDVRPLYSRRLPKGVKHLKDFPILPGEIFKYKWTVTVEDGPTKSDPRCLTRYYSSFVNMERDLASGLIGPLLICYKESVDQRGNQIMSDKRNVILFSVFDENRSWYLTENIQRFLPNPAGVQLEDPEFQASNIMHSINGYVFDSLQLSVCLHEVAYWYILSIGAQTDFLSVFFSGYTFKHKMVYEDTLTLFPFSGETVFMSMENPGLWILGCHNSDFRNRGMTALLKVSSCDKNTGDYYEDSYEDISAYLLSKNNAIEPRSFSQNPPVLKRHQREITRTTLQSDQEEIDYDDTISVEMKKEDFDIYDEDENQSPRSFQKKTRHYFIAAVERLWDYGMSSSPHVLRNRAQSGSVPQFKKVVFQEFTDGSFTQPLYRGELNEHLGLLGPYIRAEVEDNIMVTFRNQASRPYSFYSSLISYEEDQRQGAEPRKNFVKPNETKTYFWKVQHHMAPTKDEFDCKAWAYFSDVDLEKDVHSGLIGPLLVCHTNTLNPAHGRQVTVQEFALFFTIFDETKSWYFTENMERNCRAPCNIQMEDPTFKENYRFHAINGYIMDTLPGLVMAQDQRIRWYLLSMGSNENIHSIHFSGHVFTVRKKEEYKMALYNLYPGVFETVEMLPSKAGIWRVECLIGEHLHAGMSTLFLVYSNKCQTPLGMASGHIRDFQITASGQYGQWAPKLARLHYSGSINAWSTKEPFSWIKVDLLAPMIIHGIKTQGARQKFSSLYISQFIIMYSLDGKKWQTYRGNSTGTLMVFFGNVDSSGIKHNIFNPPIIARYIRLHPTHYSIRSTLRMELMGCDLNSCSMPLGMESKAISDAQITASSYFTNMFATWSPSKARLHLQGRSNAWRPQVNNPKEWLQVDFQKTMKVTGVTTQGVKSLLTSMYVKEFLISSSQDGHQWTLFFQNGKVKVFQGNQDSFTPVVNSLDPPLLTRYLRIHPQSWVHQIALRMEVLGCEAQDLY

SEQ ID NO: 2749 - DNA, 4371 bp, synthetic construct
  misc_feature 1..4371: note = Variant of human B-domain deleted Factor VIII
  source 1..4371: mol_type = other DNA
atgcagattgaactgtctacctgcttcttcctctgtttgctgaggttctgctttagcgccactagacggtactaccttggcgctgtggagctgtcctgggactatatgcagagtgatttgggagagcttcccgtcgacgcacgatttcctcctcgcgttccaaagtcatttcccttcaacacaagcgtggtgtacaagaagacgctcttcgtcgaattcaccgatcacctgttcaatatcgccaaacccagaccaccatggatgggtcttttggggcctaccatacaagcggaggtgtatgacacagttgttatcactctcaagaacatggcttctcatccggtaagtcttcacgcagtgggcgtgtcctactggaaagcttcagaaggagccgagtatgatgatcagacatcccagagggagaaagaagacgacaaggtatttccaggtgggtctcatacctatgtgtggcaagtgctcaaagagaatggccctatggcaagcgatccgctctgtttgacttacagctacctttcacacgttgacctcgtcaaggacctcaactccgggttgattggagccttgttggtatgcagggaaggatctcttgccaaagagaagacacagaccctcagtaagtttatccttctctttgctgtgttcgatgagggcaaaagttggcatagcgaaacgaagaattccctcatgcaggatcgcgacgcagccagcgccagagcttggcccaagatgcacactgtgaacggatatgtcaataggtcacttcctggcttgattgggtgtcatcggaaaagtgtctactggcacgtgatcggaatggggacaacaccagaggtccactccatatttctcgaaggccataccttccttgttcgaaaccacagacaggcatccttggagatctctcccattacctttctcactgcccaaacgctccttatggacttgggtcagttccttctcttctgccatatcagctcacaccagcatgatggtatggaagcttatgtgaaagtcgacagttgtcctgaggagccacagttgcgcatgaagaataatgaagaagccgaggattacgacgacgatctcaccgattctgagatggacgtggtgaggtttgatgacgacaactctccctccttcattcaaatccggagcgtggcgaagaaacaccccaagacttgggtccactatatagcggcggaagaggaggattgggattacgctcctcttgtattggcaccagatgaccgctcatacaaaagccagtacctcaacaacggaccgcagagaattggccggaagtataagaaagtgcgatttatggcctatacagacgaaacctttaagacaagggaggccatccagcatgagagtgggattttgggacctcttctttacggcgaagttggtgataccctcctcatcatcttcaagaatcaagcttctcgcccctataacatttacccacacgggatcactgacgttaggcctttgtatagcagaagacttccaaaaggcgtgaagcatctcaaagacttccccattttgccaggcgagatctttaagtacaaatggaccgtcacagtggaagatggaccgactaaatcagaccctcgatgccttacgcggtactattcctccttcgtgaatatggagagagatttggcaagcggactcataggaccactcctcatctgttacaaggaatctgtagaccagaggggtaaccagattatgagtgataaacgcaatgtgatcctttttagcgtcttcgacgagaaccggtcctggtacttgaccgagaatatacaaaggttccttcccaaccccgcaggcgttcagttggaagaccctgagtttcaggccagcaatattatgcactcaatcaacggctatgtgtttgatagtctccagctttctgtttgcctccatgaagtagcctattggtacatcttgtcaattggtgctcaaacagacttcctctccgtcttcttctccggctacacctttaagcacaagatggtgtatgaggacactctcacactctttccattttctggagaaaccgtgttcatgagcatggagaatccaggcctttggatcttgggttgccacaacagtgattttcgcaatcggggaatgactgctctcctcaaagtcagcagctgtgataagaacacaggcgactattacgaagattcttacgaggacataagtgcctacttgttgtccaagaataacgccattgagcccagatcattctcccagaatcctcccgtgcttaaaaggcatcagcgcgaaatcaccagaactactcttcagtctgatcaagaggagattgactatgacgacaccataagcgtggaaatgaagaaggaggatttcgatatctatgacgaagatgagaaccagtctccgcggagctttcagaagaagacgcgacactacttcattgcagcagtcgaaaggctttgggactacggtatgtcatcatcccctcatgtgttgcgcaatagagctcagagtggaagtgttccacagttcaagaaagtcgtctttcaagagtttacagatggcagcttcacacagcctctctatcggggcgagcttaacgaacatttgggactccttggtccctatatccgagccgaagtggaggacaacattatggttacctttaggaatcaagcctctcgcccctacagcttctactcctccctcatcagttatgaggaggatcagagacaaggcgctgaaccacggaagaactttgtgaaaccgaatgagacgaagacctacttctggaaagtacagcaccacatggcccccacaaaagacgaattcgattgcaaagcatgggcgtatttttcagacgttgacttggagaaagatgtacattcaggacttattggtcctttgttggtgtgtcacactaacactctcaatccagcccatggcaggcaggtgacagtccaggaattcgctcttttctttaccatctttgatgagaccaagtcctggtacttcacggaaaacatggagcgcaattgcagagccccctgtaacatacagatggaggaccctacctttaaggaaaattatcggttccacgcaatcaacggatacattatggatacactccctggccttgtgatggctcaggaccaacgaatcaggtggtacctcctcagcatgggttctaatgagaacatacactccattcacttttcaggacatgtgttcactgtccggaagaaagaagagtataagatggccctctacaatttgtatccaggcgtgtttgagaccgttgaaatgcttccctctaaagctggcatctggagagtagagtgcttgatcggagaacatcttcacgcaggtatgagcaccttgttcctcgtgtacagcaacaaatgtcagaccccacttggcatggccagtggacacattcgcgactttcagatcacagcatctggccagtatggacaatgggccccaaagttggctcgcctccattactccggtagcataaatgcgtggtccactaaagaacctttcagctggattaaggtcgatcttcttgcccccatgatcatccacggcattaagacacagggagcgaggcagaaattctcctccctctacatctcacagttcattattatgtatagtttggacggcaagaagtggcaaacttatagaggtaacagtactggaacactcatggtgttcttcggcaacgttgatagctctggcatcaaacacaacatctttaatcctcccataatagctcggtacatcagattgcatccgacccactacagcattaggagtacactccgaatggagcttatgggttgcgacttgaattcctgttcaatgccactcggaatggagtctaaagccatctctgatgcacagataaccgccagtagctactttacgaacatgtttgctacgtggtcaccctctaaggcaaggcttcatttgcaaggccggtctaatgcctggagacctcaggtgaacaacccgaaagaatggctccaggtggactttcagaagaccatgaaagtaacaggtgtcactactcagggagttaagtccttgctcaccagcatgtatgtgaaggagttccttatttcctcatcacaagatggccaccagtggaccctcttctttcagaatggtaaggtcaaagtgtttcagggcaatcaagacagcttcacacccgtggtgaacagtcttgatcctccactcttgacacgataccttcgaatccatccacagtcttgggttcaccagattgcattgcgcatggaagtacttggatgcgaggctcaggacctctac

SEQ ID NO: 2750 - protein, 1457 aa, synthetic construct
  REGION 1..1457: note = Variant of human B-domain deleted Factor VIII
MQIELSTCFFLCLLRFCFSATRRYYLGAVELSWDYMQSDLGELPVDARFPPRVPKSFPFNTSVVYKKTLFVEFTDHLFNIAKPRPPWMGLLGPTIQAEVYDTVVITLKNMASHPVSLHAVGVSYWKASEGAEYDDQTSQREKEDDKVFPGGSHTYVWQVLKENGPMASDPLCLTYSYLSHVDLVKDLNSGLIGALLVCREGSLAKEKTQTLSKFILLFAVFDEGKSWHSETKNSLMQDRDAASARAWPKMHTVNGYVNRSLPGLIGCHRKSVYWHVIGMGTTPEVHSIFLEGHTFLVRNHRQASLEISPITFLTAQTLLMDLGQFLLFCHISSHQHDGMEAYVKVDSCPEEPQLRMKNNEEAEDYDDDLTDSEMDVVRFDDDNSPSFIQIRSVAKKHPKTWVHYIAAEEEDWDYAPLVLAPDDRSYKSQYLNNGPQRIGRKYKKVRFMAYTDETFKTREAIQHESGILGPLLYGEVGDTLLIIFKNQASRPYNIYPHGITDVRPLYSRRLPKGVKHLKDFPILPGEIFKYKWTVTVEDGPTKSDPRCLTRYYSSFVNMERDLASGLIGPLLICYKESVDQRGNQIMSDKRNVILFSVFDENRSWYLTENIQRFLPNPAGVQLEDPEFQASNIMHSINGYVFDSLQLSVCLHEVAYWYILSIGAQTDFLSVFFSGYTFKHKMVYEDTLTLFPFSGETVFMSMENPGLWILGCHNSDFRNRGMTALLKVSSCDKNTGDYYEDSYEDISAYLLSKNNAIEPRSFSQNPPVLKRHQREITRTTLQSDQEEIDYDDTISVEMKKEDFDIYDEDENQSPRSFQKKTRHYFIAAVERLWDYGMSSSPHVLRNRAQSGSVPQFKKVVFQEFTDGSFTQPLYRGELNEHLGLLGPYIRAEVEDNIMVTFRNQASRPYSFYSSLISYEEDQRQGAEPRKNFVKPNETKTYFWKVQHHMAPTKDEFDCKAWAYFSDVDLEKDVHSGLIGPLLVCHTNTLNPAHGRQVTVQEFALFFTIFDETKSWYFTENMERNCRAPCNIQMEDPTFKENYRFHAINGYIMDTLPGLVMAQDQRIRWYLLSMGSNENIHSIHFSGHVFTVRKKEEYKMALYNLYPGVFETVEMLPSKAGIWRVECLIGEHLHAGMSTLFLVYSNKCQTPLGMASGHIRDFQITASGQYGQWAPKLARLHYSGSINAWSTKEPFSWIKVDLLAPMIIHGIKTQGARQKFSSLYISQFIIMYSLDGKKWQTYRGNSTGTLMVFFGNVDSSGIKHNIFNPPIIARYIRLHPTHYSIRSTLRMELMGCDLNSCSMPLGMESKAISDAQITASSYFTNMFATWSPSKARLHLQGRSNAWRPQVNNPKEWLQVDFQKTMKVTGVTTQGVKSLLTSMYVKEFLISSSQDGHQWTLFFQNGKVKVFQGNQDSFTPVVNSLDPPLLTRYLRIHPQSWVHQIALRMEVLGCEAQDLY

SEQ ID NO: 2751 - DNA, 4371 bp, synthetic construct
  misc_feature 1..4371: note = Variant of human B-domain deleted Factor VIII
  source 1..4371: mol_type = other DNA
atgcagattgaactgtctacctgcttcttcctctgtttgctgaggttctgctttagcgccactagacggtactaccttggcgctgtggagctgtcctgggactatatgcagagtgatttgggagagcttcccgtcgacgcacgatttcctcctcgcgttccaaagtcatttcccttcaacacaagcgtggtgtacaagaagacgctcttcgtcgaattcaccgatcacctgttcaatatcgccaaacccagaccaccatggatgggtcttttggggcctaccatacaagcggaggtgtatgacacagttgttatcactctcaagaacatggcttctcatccggtaagtcttcacgcagtgggcgtgtcctactggaaagcttcagaaggagccgagtatgatgatcagacatcccagagggagaaagaagacgacaaggtatttccaggtgggtctcatacctatgtgtggcaagtgctcaaagagaatggccctatggcaagcgatccgctctgtttgacttacagctacctttcacacgttgacctcgtcaaggacctcaactccgggttgattggagccttgttggtatgcagggaaggatctcttgccaaagagaagacacagaccctccacaagtttatccttctctttgctgtgttcgatgagggcaaaagttggcatagcgaaacgaagaattccctcatgcaggatcgcgacgcagccagcgccagagcttggcccaagatgcacactgtgaacggatatgtcaataggtcacttcctggcttgattgggtgtcatcggaaaagtgtctactggcacgtgatcggaatggggacaacaccagaggtccactccatatttctcgaaggccataccttccttgttcgaaaccacagacaggcatccttggagatctctcccattacctttctcactgcccaaacgctccttatggacttgggtcagttccttctcttctgccatatcagctcacaccagcatgatggtatggaagcttatgtgaaagtcgacagttgtcctgaggagccacagttgcgcatgaagaataatgaagaagccgaggattacgacgacgatctcaccgattctgagatggacgtggtgaggtttgatgacgacaactctccctccttcattcaaatccggagcgtggcgaagaaacaccccaagacttgggtccactatatagcggcggaagaggaggattgggattacgctcctcttgtattggcaccagatgaccgctcatacaaaagccagtacctcaacaacggaccgcagagaattggccggaagtataagaaagtgcgatttatggcctatacagacgaaacctttaagacaagggaggccatccagcatgagagtgggattttgggacctcttctttacggcgaagttggtgataccctcctcatcatcttcaagaatcaagcttctcgcccctataacatttacccacacgggatcactgacgttaggcctttgtatagcagaagacttcccaaaggcgtgaagcatctcaaagacttccccattttgccaggcgagatctttaagtacaaatggaccgtcacagtggaagatggaccgactaaatcagaccctcgatgccttacgcggtactattcctccttcgtgaatatggagagagatttggcaagcggactcataggaccactcctcatctgttacaaggaatctgtagaccagaggggtaaccagattatgagtgataaacgcaatgtgatcctttttagcgtcttcgacgagaaccggtcctggtacttgaccgagaatatacaaaggttccttcccaaccccgcaggcgttcagttggaagaccctgagtttcaggccagcaatattatgcactcaatcaacggctatgtgtttgatagtctccagctttctgtttgcctccatgaagtagcctattggtacatcttgtcaattggtgctcaaacagacttcctctccgtcttcttctccggctacacctttaagcacaagatggtgtatgaggacactctcacactctttccattttctggagaaaccgtgttcatgagcatggagaatccaggcctttggatcttgggttgccacaacagtgattttcgcaatcggggaatgactgctctcctcaaagtcagcagctgtgataagaacacaggcgactattacgaagattcttacgaggacataagtgcctacttgttgtccaagaataacgccattgagcccagatcattctcccagaatcctcccgtgcttaaaaggcatcagcgcgaaatcaccagaactactcttcagtctgatcaagaggagattgactatgacgacaccataagcgtggaaatgaagaaggaggatttcgatatctatgacgaagatgagaaccagtctccgcggagctttcagaagaagacgcgacactacttcattgcagcagtcgaaaggctttgggactacggtatgtcatcatcccctcatgtgttgcgcaatagagctcagagtggaagtgttccacagttcaagaaagtcgtctttcaagagtttacagatggcagcttcacacagcctctctatcggggcgagcttaacgaacatttgggactccttggtccctatatccgagccgaagtggaggacaacattatggttacctttaggaatcaagcctctcgcccctacagcttctactcctccctcatcagttatgaggaggatcagagacaaggcgctgaaccacggaagaactttgtgaaaccgaatgagacgaagacctacttctggaaagtacagcaccacatggcccccacaaaagacgaattcgattgcaaagcatgggcgtatttttcagacgttgacttggagaaagatgtacattcaggacttattggtcctttgttggtgtgtcacactaacactctcaatccagcccatggcaggcaggtgacagtccaggaattcgctcttttctttaccatctttgatgagaccaagtcctggtacttcacggaaaacatggagcgcaattgcagagccccctgtaacatacagatggaggaccctacctttaaggaaaattatcggttccacgcaatcaacggatacattatggatacactccctggccttgtgatggctcaggaccaacgaatcaggtggtacctcctcagcatgggttctaatgagaacatacactccattcacttttcaggacatgtgttcactgtccggaagaaagaagagtataagatggccctctacaatttgtatccaggcgtgtttgagaccgttgaaatgcttccctctaaagctggcatctggagagtagagtgcttgatcggagaacatcttcacgcaggtatgagcaccttgttcctcgtgtacagcaacaaatgtcagatgccacttggcatggccagtggacacattcgcgactttcagatcacagcatctggccagtatggacaatgggccccaaagttggctcgcctccattactccggtagcataaatgcgtggtccactaaagaacctttcagctggattaaggtcgatcttcttgcccccatgatcatccacggcattaagacacagggagcgaggcagaaattctcctccctctacatctcacagttcattattatgtatagtttggacggcaagaagtggcaaacttatagaggtaacagtactggaacactcatggtgttcttcggcaacgttgatagctctggcatcaaacacaacatctttaatcctcccataatagctcggtacatcagattgcatccgacccactacagcattaggagtacactccgaatggagcttatgggttgcgacttgaattcctgttcaatgccactcggaatggagtctaaagccatctctgatgcacagataaccgccagtagctactttacgaacatgtttgctacgtggtcaccctctaaggcaaggcttcatttgcaaggccggtctaatgcctggagacctcaggtgaacaacccgaaagaatggctccaggtggactttcagaagaccatgaaagtaacaggtgtcactactcagggagttaagtccttgctcaccagcatgtatgtgaaggagttccttatttcctcatcacaagatggccaccagtggaccctcttctttcagaatggtaaggtcaaagtgtttcagggcaatcaagacagcttcacacccgtggtgaacagtcttgatcctccactcttgacacgataccttcgaatccatccacagtcttgggttcaccagattgcattgcgcatggaagtacttggatgcgaggctcaggacctctac

SEQ ID NO: 2752 - protein, 1457 aa, synthetic construct
  REGION 1..1457: note = Variant of human B-domain deleted Factor VIII
MQIELSTCFFLCLLRFCFSATRRYYLGAVELSWDYMQSDLGELPVDARFPPRVPKSFPFNTSVVYKKTLFVEFTDHLFNIAKPRPPWMGLLGPTIQAEVYDTVVITLKNMASHPVSLHAVGVSYWKASEGAEYDDQTSQREKEDDKVFPGGSHTYVWQVLKENGPMASDPLCLTYSYLSHVDLVKDLNSGLIGALLVCREGSLAKEKTQTLHKFILLFAVFDEGKSWHSETKNSLMQDRDAASARAWPKMHTVNGYVNRSLPGLIGCHRKSVYWHVIGMGTTPEVHSIFLEGHTFLVRNHRQASLEISPITFLTAQTLLMDLGQFLLFCHISSHQHDGMEAYVKVDSCPEEPQLRMKNNEEAEDYDDDLTDSEMDVVRFDDDNSPSFIQIRSVAKKHPKTWVHYIAAEEEDWDYAPLVLAPDDRSYKSQYLNNGPQRIGRKYKKVRFMAYTDETFKTREAIQHESGILGPLLYGEVGDTLLIIFKNQASRPYNIYPHGITDVRPLYSRRLPKGVKHLKDFPILPGEIFKYKWTVTVEDGPTKSDPRCLTRYYSSFVNMERDLASGLIGPLLICYKESVDQRGNQIMSDKRNVILFSVFDENRSWYLTENIQRFLPNPAGVQLEDPEFQASNIMHSINGYVFDSLQLSVCLHEVAYWYILSIGAQTDFLSVFFSGYTFKHKMVYEDTLTLFPFSGETVFMSMENPGLWILGCHNSDFRNRGMTALLKVSSCDKNTGDYYEDSYEDISAYLLSKNNAIEPRSFSQNPPVLKRHQREITRTTLQSDQEEIDYDDTISVEMKKEDFDIYDEDENQSPRSFQKKTRHYFIAAVERLWDYGMSSSPHVLRNRAQSGSVPQFKKVVFQEFTDGSFTQPLYRGELNEHLGLLGPYIRAEVEDNIMVTFRNQASRPYSFYSSLISYEEDQRQGAEPRKNFVKPNETKTYFWKVQHHMAPTKDEFDCKAWAYFSDVDLEKDVHSGLIGPLLVCHTNTLNPAHGRQVTVQEFALFFTIFDETKSWYFTENMERNCRAPCNIQMEDPTFKENYRFHAINGYIMDTLPGLVMAQDQRIRWYLLSMGSNENIHSIHFSGHVFTVRKKEEYKMALYNLYPGVFETVEMLPSKAGIWRVECLIGEHLHAGMSTLFLVYSNKCQMPLGMASGHIRDFQITASGQYGQWAPKLARLHYSGSINAWSTKEPFSWIKVDLLAPMIIHGIKTQGARQKFSSLYISQFIIMYSLDGKKWQTYRGNSTGTLMVFFGNVDSSGIKHNIFNPPIIARYIRLHPTHYSIRSTLRMELMGCDLNSCSMPLGMESKAISDAQITASSYFTNMFATWSPSKARLHLQGRSNAWRPQVNNPKEWLQVDFQKTMKVTGVTTQGVKSLLTSMYVKEFLISSSQDGHQWTLFFQNGKVKVFQGNQDSFTPVVNSLDPPLLTRYLRIHPQSWVHQIALRMEVLGCEAQDLY

SEQ ID NO: 2753 - DNA, 4371 bp, synthetic construct
  misc_feature 1..4371: note = Variant of human B-domain deleted Factor VIII
  source 1..4371: mol_type = other DNA
atgcagattgaactgtctacctgcttcttcctctgtttgctgaggttctgctttagcgccactagacggtactaccttggcgctgtggagctgtcctgggactatatgcagagtgatttgggagagcttcccgtcgacgcacgatttcctcctcgcgttccaaagtcatttcccttcaacacaagcgtggtgtacaagaagacgctcttcgtcgaattcaccgatcacctgttcaatatcgccaaacccagaccaccatggatgggtcttttggggcctaccatacaagcggaggtgtatgacacagttgttatcactctcaagaacatggcttctcatccggtaagtcttcacgcagtgggcgtgtcctactggaaagcttcagaaggagccgagtatgatgatcagacatcccagagggagaaagaagacgacaaggtatttccaggtgggtctcatacctatgtgtggcaagtgctcaaagagaatggccctatggcaagcgatccgctctgtttgacttacagctacctttcacacgttgacctcgtcaaggacctcaactccgggttgattggagccttgttggtatgcagggaaggatctcttgccaaagagaagacacagaccctccacaagtttatccttctctttgctgtgttcgatgagggcaaaagttggcatagcgaaacgaagaattccctcatgcaggatcgcgacgcagccagcgccagagcttggcccaagatgcacactgtgaacggatatgtcaataggtcacttcctggcttgattgggtgtcatcggaaaagtgtctactggcacgtgatcggaatggggacaacaccagaggtccactccatatttctcgaaggccataccttccttgttcgaaaccacagacaggcatccttggagatctctcccattacctttctcactgcccaaacgctccttatggacttgggtcagttccttctcttctgccatatcagctcacaccagcatgatggtatggaagcttatgtgaaagtcgacagttgtcctgaggagccacagttgcgcatgaagaataatgaagaagccgaggattacgacgacgatctcaccgattctgagatggacgtggtgaggtttgatgacgacaactctccctccttcattcaaatccggagcgtggcgaagaaacaccccaagacttgggtccactatatagcggcggaagaggaggattgggattacgctcctcttgtattggcaccagatgaccgctcatacaaaagccagtacctcaacaacggaccgcagagaattggccggaagtataagaaagtgcgatttatggcctatacagacgaaacctttaagacaagggaggccatccagcatgagagtgggattttgggacctcttctttacggcgaagttggtgataccctcctcatcatcttcaagaatcaagcttctcgcccctataacatttacccacacgggatcactgacgttaggcctttgtatagcagaagacttcccaaaggcgtgaagcatctcaaagacttccccattttgccaggcgagatctttaagtacaaatggaccgtcacagtggaagatggaccgactaaatcagaccctcgatgccttacgcggtactattcctccttcgtgaatatggagagagatttggcaagcggactcataggaccactcctcatctgttacaaggaatctgtagaccagaggggtaaccagattatgagtgataaacgcaatgtgatcctttttagcgtcttcgacgagaaccggtcctggtacttgaccgagaatatacaaaggttccttcccaaccccgcaggcgttcagttggaagaccctgagtttcaggccagcaatattatgcactcaatcaacggctatgtgtttgatagtctccagctttctgtttgcctccatgaagtagcctattggtacatcttgtcaattggtgctcaaacagacttcctctccgtcttcttctccggctacacctttaagcacaagatggtgtatgaggacactctcacactctttccattttctggagaaaccgtgttcatgagcatggagaatccaggcctttggatcttgggttgccacaacagtgattttcgcaatcggggaatgactgctctcctcaaagtcagcagctgtgataagaacacaggcgactattacgaagattcttacgaggacataagtgcctacttgttgtccaagaataacgccattgagcccagatcattctcccagaatcctcccgtgcttaaaaggcatcagcgcgaacctaccagaactactcttcagtctgatcaagaggagattgactatgacgacaccataagcgtggaaatgaagaaggaggatttcgatatctatgacgaagatgagaaccagtctccgcggagctttcagaagaagacgcgacactacttcattgcagcagtcgaaaggctttgggactacggtatgtcatcatcccctcatgtgttgcgcaatagagctcagagtggaagtgttccacagttcaagaaagtcgtctttcaagagtttacagatggcagcttcacacagcctctctatcggggcgagcttaacgaacatttgggactccttggtccctatatccgagccgaagtggaggacaacattatggttacctttaggaatcaagcctctcgcccctacagcttctactcctccctcatcagttatgaggaggatcagagacaaggcgctgaaccacggaagaactttgtgaaaccgaatgagacgaagacctacttctggaaagtacagcaccacatggcccccacaaaagacgaattcgattgcaaagcatgggcgtatttttcagacgttgacttggagaaagatgtacattcaggacttattggtcctttgttggtgtgtcacactaacactctcaatccagcccatggcaggcaggtgacagtccaggaattcgctcttttctttaccatctttgatgagaccaagtcctggtacttcacggaaaacatggagcgcaattgcagagccccctgtaacatacagatggaggaccctacctttaaggaaaattatcggttccacgcaatcaacggatacattatggatacactccctggccttgtgatggctcaggaccaacgaatcaggtggtacctcctcagcatgggttctaatgagaacatacactccattcacttttcaggacatgtgttcactgtccggaagaaagaagagtataagatggccctctacaatttgtatccaggcgtgtttgagaccgttgaaatgcttccctctaaagctggcatctggagagtagagtgcttgatcggagaacatcttcacgcaggtatgagcaccttgttcctcgtgtacagcaacaaatgtcagaccccacttggcatggccagtggacacattcgcgactttcagatcacagcatctggccagtatggacaatgggccccaaagttggctcgcctccattactccggtagcataaatgcgtggtccactaaagaacctttcagctggattaaggtcgatcttcttgcccccatgatcatccacggcattaagacacagggagcgaggcagaaattctcctccctctacatctcacagttcattattatgtatagtttggacggcaagaagtggcaaacttatagaggtaacagtactggaacactcatggtgttcttcggcaacgttgatagctctggcatcaaacacaacatctttaatcctcccataatagctcggtacatcagattgcatccgacccactacagcattaggagtacactccgaatggagcttatgggttgcgacttgaattcctgttcaatgccactcggaatggagtctaaagccatctctgatgcacagataaccgccagtagctactttacgaacatgtttgctacgtggtcaccctctaaggcaaggcttcatttgcaaggccggtctaatgcctggagacctcaggtgaacaacccgaaagaatggctccaggtggactttcagaagaccatgaaagtaacaggtgtcactactcagggagttaagtccttgctcaccagcatgtatgtgaaggagttccttatttcctcatcacaagatggccaccagtggaccctcttctttcagaatggtaaggtcaaagtgtttcagggcaatcaagacagcttcacacccgtggtgaacagtcttgatcctccactcttgacacgataccttcgaatccatccacagtcttgggttcaccagattgcattgcgcatggaagtacttggatgcgaggctcaggacctctac

SEQ ID NO: 2754 - protein, 1457 aa, synthetic construct
  REGION 1..1457: note = Variant of human B-domain deleted Factor VIII
MQIELSTCFFLCLLRFCFSATRRYYLGAVELSWDYMQSDLGELPVDARFPPRVPKSFPFNTSVVYKKTLFVEFTDHLFNIAKPRPPWMGLLGPTIQAEVYDTVVITLKNMASHPVSLHAVGVSYWKASEGAEYDDQTSQREKEDDKVFPGGSHTYVWQVLKENGPMASDPLCLTYSYLSHVDLVKDLNSGLIGALLVCREGSLAKEKTQTLHKFILLFAVFDEGKSWHSETKNSLMQDRDAASARAWPKMHTVNGYVNRSLPGLIGCHRKSVYWHVIGMGTTPEVHSIFLEGHTFLVRNHRQASLEISPITFLTAQTLLMDLGQFLLFCHISSHQHDGMEAYVKVDSCPEEPQLRMKNNEEAEDYDDDLTDSEMDVVRFDDDNSPSFIQIRSVAKKHPKTWVHYIAAEEEDWDYAPLVLAPDDRSYKSQYLNNGPQRIGRKYKKVRFMAYTDETFKTREAIQHESGILGPLLYGEVGDTLLIIFKNQASRPYNIYPHGITDVRPLYSRRLPKGVKHLKDFPILPGEIFKYKWTVTVEDGPTKSDPRCLTRYYSSFVNMERDLASGLIGPLLICYKESVDQRGNQIMSDKRNVILFSVFDENRSWYLTENIQRFLPNPAGVQLEDPEFQASNIMHSINGYVFDSLQLSVCLHEVAYWYILSIGAQTDFLSVFFSGYTFKHKMVYEDTLTLFPFSGETVFMSMENPGLWILGCHNSDFRNRGMTALLKVSSCDKNTGDYYEDSYEDISAYLLSKNNAIEPRSFSQNPPVLKRHQREPTRTTLQSDQEEIDYDDTISVEMKKEDFDIYDEDENQSPRSFQKKTRHYFIAAVERLWDYGMSSSPHVLRNRAQSGSVPQFKKVVFQEFTDGSFTQPLYRGELNEHLGLLGPYIRAEVEDNIMVTFRNQASRPYSFYSSLISYEEDQRQGAEPRKNFVKPNETKTYFWKVQHHMAPTKDEFDCKAWAYFSDVDLEKDVHSGLIGPLLVCHTNTLNPAHGRQVTVQEFALFFTIFDETKSWYFTENMERNCRAPCNIQMEDPTFKENYRFHAINGYIMDTLPGLVMAQDQRIRWYLLSMGSNENIHSIHFSGHVFTVRKKEEYKMALYNLYPGVFETVEMLPSKAGIWRVECLIGEHLHAGMSTLFLVYSNKCQTPLGMASGHIRDFQITASGQYGQWAPKLARLHYSGSINAWSTKEPFSWIKVDLLAPMIIHGIKTQGARQKFSSLYISQFIIMYSLDGKKWQTYRGNSTGTLMVFFGNVDSSGIKHNIFNPPIIARYIRLHPTHYSIRSTLRMELMGCDLNSCSMPLGMESKAISDAQITASSYFTNMFATWSPSKARLHLQGRSNAWRPQVNNPKEWLQVDFQKTMKVTGVTTQGVKSLLTSMYVKEFLISSSQDGHQWTLFFQNGKVKVFQGNQDSFTPVVNSLDPPLLTRYLRIHPQSWVHQIALRMEVLGCEAQDLY

SEQ ID NO: 2755 - DNA, 4371 bp, synthetic construct
  misc_feature 1..4371: note = Variant of human B-domain deleted Factor VIII
  source 1..4371: mol_type = other DNA
atgcagattgaactgtctacctgcttcttcctctgtttgctgaggttctgctttagcgccactagacggtactaccttggcgctgtggagctgtcctgggactatatgcagagtgatttgggagagcttcccgtcgacgcacgatttcctcctcgcgttccaaagtcatttcccttcaacacaagcgtggtgtacaagaagacgctcttcgtcgaattcaccgatcacctgttcaatatcgccaaacccagaccaccatggatgggtcttttggggcctaccatacaagcggaggtgtatgacacagttgttatcactctcaagaacatggcttctcatccggtaagtcttcacgcagtgggcgtgtcctactggaaagcttcagaaggagccgagtatgatgatcagacatcccagagggagaaagaagacgacaaggtatttccaggtgggtctcatacctatgtgtggcaagtgctcaaagagaatggccctatggcaagcgatccgctctgtttgacttacagctacctttcacacgttgacctcgtcaaggacctcaactccgggttgattggagccttgttggtatgcagggaaggatctcttgccaaagagaagacacagaccctccacaagtttatccttctctttgctgtgttcgatgagggcaaaagttggcatagcgaaacgaagaattccctcatgcaggatcgcgacgcagccagcgccagagcttggcccaagatgcacactgtgaacggatatgtcaataggtcacttcctggcttgattgggtgtcatcggaaaagtgtctactggcacgtgatcggaatggggacaacaccagaggtccactccatatttctcgaaggccataccttccttgttcgaaaccacagacaggcatccttggagatctctcccattacctttctcactgcccaaacgctccttatggacttgggtcagttccttctcttctgccatatcagctcacaccagcatgatggtatggaagcttatgtgaaagtcgacagttgtcctgaggagccacagttgcgcatgaagaataatgaagaagccgaggattacgacgacgatctcaccgattctgagatggacgtggtgaggtttgatgacgacaactctccctccttcattcaaatccggagcgtggcgaagaaacaccccaagacttgggtccactatatagcggcggaagaggaggattgggattacgctcctcttgtattggcaccagatgaccgctcatacaaaagccagtacctcaacaacggaccgcagagaattggccggaagtataagaaagtgcgatttatggcctatacagacgaaacctttaagacaagggaggccatccagcatgagagtgggattttgggacctcttctttacggcgaagttggtgataccctcctcatcatcttcaagaatcaagcttctcgcccctataacatttacccacacgggatcactgacgttaggcctttgtatagcagaagacttcccaaaggcgtgaagcatctcaaagacttccccattttgccaggcgagatctttaagtacaaatggaccgtcacagtggaagatggaccgactaaatcagaccctcgatgccttacgcggtactattcctccttcgtgaatatggagagagatttggcaagcggactcataggaccactcctcatctgttacaaggaatctgtagaccagaggggtaaccagattatgagtgataaacgcaatgtgatcctttttagcgtcttcgacgagaaccggtcctggtacttgaccgagaatatacaaaggttccttcccaaccccgcaggcgttcagttggaagaccctgagtttcaggccagcaatattatgcactcaatcaacggctatgtgtttgatagtctccagctttctgtttgcctccatgaagtagcctattggtacatcttgtcaattggtgctcaaacagacttcctctccgtcttcttctccggctacacctttaagcacaagatggtgtatgaggacactctcacactctttccattttctggagaaaccgtgttcatgagcatggagaatccaggcctttggatcttgggttgccacaacagtgattttcgcaatcggggaatgactgctctcctcaaagtcagcagctgtgatatgaacacaggcgactattacgaagattcttacgaggacataagtgcctacttgttgtccaagaataacgccattgagcccagatcattctcccagaatcctcccgtgcttaaaaggcatcagcgcgaaatcaccagaactactcttcagtctgatcaagaggagattgactatgacgacaccataagcgtggaaatgaagaaggaggatttcgatatctatgacgaagatgagaaccagtctccgcggagctttcagaagaagacgcgacactacttcattgcagcagtcgaaaggctttgggactacggtatgtcatcatcccctcatgtgttgcgcaatagagctcagagtggaagtgttccacagttcaagaaagtcgtctttcaagagtttacagatggcagcttcacacagcctctctatcggggcgagcttaacgaacatttgggactccttggtccctatatccgagccgaagtggaggacaacattatggttacctttaggaatcaagcctctcgcccctacagcttctactcctccctcatcagttatgaggaggatcagagacaaggcgctgaaccacggaagaactttgtgaaaccgaatgagacgaagacctacttctggaaagtacagcaccacatggcccccacaaaagacgaattcgattgcaaagcatgggcgtatttttcagacgttgacttggagaaagatgtacattcaggacttattggtcctttgttggtgtgtcacactaacactctcaatccagcccatggcaggcaggtgacagtccaggaattcgctcttttctttaccatctttgatgagaccaagtcctggtacttcacggaaaacatggagcgcaattgcagagccccctgtaacatacagatggaggaccctacctttaaggaaaattatcggttccacgcaatcaacggatacattatggatacactccctggccttgtgatggctcaggaccaacgaatcaggtggtacctcctcagcatgggttctaatgagaacatacactccattcacttttcaggacatgtgttcactgtccggaagaaagaagagtataagatggccctctacaatttgtatccaggcgtgtttgagaccgttgaaatgcttccctctaaagctggcatctggagagtagagtgcttgatcggagaacatcttcacgcaggtatgagcaccttgttcctcgtgtacagcaacaaatgtcagaccccacttggcatggccagtggacacattcgcgactttcagatcacagcatctggccagtatggacaatgggccccaaagttggctcgcctccattactccggtagcataaatgcgtggtccactaaagaacctttcagctggattaaggtcgatcttcttgcccccatgatcatccacggcattaagacacagggagcgaggcagaaattctcctccctctacatctcacagttcattattatgtatagtttggacggcaagaagtggcaaacttatagaggtaacagtactggaacactcatggtgttcttcggcaacgttgatagctctggcatcaaacacaacatctttaatcctcccataatagctcggtacatcagattgcatccgacccactacagcattaggagtacactccgaatggagcttatgggttgcgacttgaattcctgttcaatgccactcggaatggagtctaaagccatctctgatgcacagataaccgccagtagctactttacgaacatgtttgctacgtggtcaccctctaaggcaaggcttcatttgcaaggccggtctaatgcctggagacctcaggtgaacaacccgaaagaatggctccaggtggactttcagaagaccatgaaagtaacaggtgtcactactcagggagttaagtccttgctcaccagcatgtatgtgaaggagttccttatttcctcatcacaagatggccaccagtggaccctcttctttcagaatggtaaggtcaaagtgtttcagggcaatcaagacagcttcacacccgtggtgaacagtcttgatcctccactcttgacacgataccttcgaatccatccacagtcttgggttcaccagattgcattgcgcatggaagtacttggatgcgaggctcaggacctctac

SEQ ID NO: 2756 - protein, 1457 aa, synthetic construct
  REGION 1..1457: note = Variant of human B-domain deleted Factor VIII
MQIELSTCFFLCLLRFCFSATRRYYLGAVELSWDYMQSDLGELPVDARFPPRVPKSFPFNTSVVYKKTLFVEFTDHLFNIAKPRPPWMGLLGPTIQAEVYDTVVITLKNMASHPVSLHAVGVSYWKASEGAEYDDQTSQREKEDDKVFPGGSHTYVWQVLKENGPMASDPLCLTYSYLSHVDLVKDLNSGLIGALLVCREGSLAKEKTQTLHKFILLFAVFDEGKSWHSETKNSLMQDRDAASARAWPKMHTVNGYVNRSLPGLIGCHRKSVYWHVIGMGTTPEVHSIFLEGHTFLVRNHRQASLEISPITFLTAQTLLMDLGQFLLFCHISSHQHDGMEAYVKVDSCPEEPQLRMKNNEEAEDYDDDLTDSEMDVVRFDDDNSPSFIQIRSVAKKHPKTWVHYIAAEEEDWDYAPLVLAPDDRSYKSQYLNNGPQRIGRKYKKVRFMAYTDETFKTREAIQHESGILGPLLYGEVGDTLLIIFKNQASRPYNIYPHGITDVRPLYSRRLPKGVKHLKDFPILPGEIFKYKWTVTVEDGPTKSDPRCLTRYYSSFVNMERDLASGLIGPLLICYKESVDQRGNQIMSDKRNVILFSVFDENRSWYLTENIQRFLPNPAGVQLEDPEFQASNIMHSINGYVFDSLQLSVCLHEVAYWYILSIGAQTDFLSVFFSGYTFKHKMVYEDTLTLFPFSGETVFMSMENPGLWILGCHNSDFRNRGMTALLKVSSCDMNTGDYYEDSYEDISAYLLSKNNAIEPRSFSQNPPVLKRHQREITRTTLQSDQEEIDYDDTISVEMKKEDFDIYDEDENQSPRSFQKKTRHYFIAAVERLWDYGMSSSPHVLRNRAQSGSVPQFKKVVFQEFTDGSFTQPLYRGELNEHLGLLGPYIRAEVEDNIMVTFRNQASRPYSFYSSLISYEEDQRQGAEPRKNFVKPNETKTYFWKVQHHMAPTKDEFDCKAWAYFSDVDLEKDVHSGLIGPLLVCHTNTLNPAHGRQVTVQEFALFFTIFDETKSWYFTENMERNCRAPCNIQMEDPTFKENYRFHAINGYIMDTLPGLVMAQDQRIRWYLLSMGSNENIHSIHFSGHVFTVRKKEEYKMALYNLYPGVFETVEMLPSKAGIWRVECLIGEHLHAGMSTLFLVYSNKCQTPLGMASGHIRDFQITASGQYGQWAPKLARLHYSGSINAWSTKEPFSWIKVDLLAPMIIHGIKTQGARQKFSSLYISQFIIMYSLDGKKWQTYRGNSTGTLMVFFGNVDSSGIKHNIFNPPIIARYIRLHPTHYSIRSTLRMELMGCDLNSCSMPLGMESKAISDAQITASSYFTNMFATWSPSKARLHLQGRSNAWRPQVNNPKEWLQVDFQKTMKVTGVTTQGVKSLLTSMYVKEFLISSSQDGHQWTLFFQNGKVKVFQGNQDSFTPVVNSLDPPLLTRYLRIHPQSWVHQIALRMEVLGCEAQDLY

SEQ ID NO: 2757 - DNA, 4371 bp, synthetic construct
  misc_feature 1..4371: note = Variant of human B-domain deleted Factor VIII
  source 1..4371: mol_type = other DNA
atgcagattgaactgtctacctgcttcttcctctgtttgctgaggttctgctttagcgccactagacggtactaccttggcgctgtggagctgtcctgggactatatgcagagtgatttgggagagcttcccgtcgacgcacgatttcctcctcgcgttccaaagtcatttcccttcaacacaagcctggtgtacaagaagacgctcttcgtcgaattcaccgatcacctgttcaatatcgccaaacccagaccaccatggatgggtcttttggggcctaccatacaagcggaggtgtatgacacagttgttatcactctcaagaacatggcttctcatccggtaagtcttcacgcagtgggcgtgtcctactggaaagcttcagaaggagccgagtatgatgatcagacatcccagagggagaaagaagacgacaaggtatttccaggtgggtctcatacctatgtgtggcaagtgctcaaagagaatggccctatggcaagcgatccgctctgtttgacttacagctacctttcacacgttgacctcgtcaaggacctcaactccgggttgattggagccttgttggtatgcagggaaggatctcttgccaaagagaagacacagaccctccacaagtttatccttctctttgctgtgttcgatgagggcaaaagttggcatagcgaaacgaagaattccctcatgcaggatcgcgacgcagccagcgccagagcttggcccaagatgcacactgtgaacggatatgtcaataggtcacttcctggcttgattgggtgtcatcggaaaagtgtctactggcacgtgatcggaatggggacaacaccagaggtccactccatatttctcgaaggccataccttccttgttcgaaaccacagacaggcatccttggagatctctcccattacctttctcactgcccaaacgctccttatggacttgggtcagttccttctcttctgccatatcagctcacaccagcatgatggtatggaagcttatgtgaaagtcgacagttgtcctgaggagccacagttgcgcatgaagaataatgaagaagccgaggattacgacgacgatctcaccgattctgagatggacgtggtgaggtttgatgacgacaactctccctccttcattcaaatccggagcgtggcgaagaaacaccccaagacttgggtccactatatagcggcggaagaggaggattgggattacgctcctcttgtattggcaccagatgaccgctcatacaaaagccagtacctcaacaacggaccgcagagaattggccggaagtataagaaagtgcgatttatggcctatacagacgaaacctttaagacaagggaggccatccagcatgagagtgggattttgggacctcttctttacggcgaagttggtgataccctcctcatcatcttcaagaatcaagcttctcgcccctataacatttacccacacgggatcactgacgttaggcctttgtatagcagaagacttcccaaaggcgtgaagcatctcaaagacttccccattttgccaggcgagatctttaagtacaaatggaccgtcacagtggaagatggaccgactaaatcagaccctcgatgccttacgcggtactattcctccttcgtgaatatggagagagatttggcaagcggactcataggaccactcctcatctgttacaaggaatctgtagaccagaggggtaaccagattatgagtgataaacgcaatgtgatcctttttagcgtcttcgacgagaaccggtcctggtacttgaccgagaatatacaaaggttccttcccaaccccgcaggcgttcagttggaagaccctgagtttcaggccagcaatattatgcactcaatcaacggctatgtgtttgatagtctccagctttctgtttgcctccatgaagtagcctattggtacatcttgtcaattggtgctcaaacagacttcctctccgtcttcttctccggctacacctttaagcacaagatggtgtatgaggacactctcacactctttccattttctggagaaaccgtgttcatgagcatggagaatccaggcctttggatcttgggttgccacaacagtgattttcgcaatcggggaatgactgctctcctcaaagtcagcagctgtgataagaacacaggcgactattacgaagattcttacgaggacataagtgcctacttgttgtccaagaataacgccattgagcccagatcattctcccagaatcctcccgtgcttaaaaggcatcagcgcgaaatcaccagaactactcttcagtctgatcaagaggagattgactatgacgacaccataagcgtggaaatgaagaaggaggatttcgatatctatgacgaagatgagaaccagtctccgcggagctttcagaagaagacgcgacactacttcattgcagcagtcgaaaggctttgggactacggtatgtcatcatcccctcatgtgttgcgcaatagagctcagagtggaagtgttccacagttcaagaaagtcgtctttcaagagtttacagatggcagcttcacacagcctctctatcggggcgagcttaacgaacatttgggactccttggtccctatatccgagccgaagtggaggacaacattatggttacctttaggaatcaagcctctcgcccctacagcttctactcctccctcatcagttatgaggaggatcagagacaaggcgctgaaccacggaagaactttgtgaaaccgaatgagacgaagacctacttctggaaagtacagcaccacatggcccccacaaaagacgaattcgattgcaaagcatgggcgtatttttcagacgttgacttggagaaagatgtacattcaggacttattggtcctttgttggtgtgtcacactaacactctcaatccagcccatggcaggcaggtgacagtccaggaattcgctcttttctttaccatctttgatgagaccaagtcctggtacttcacggaaaacatggagcgcaattgcagagccccctgtaacatacagatggaggaccctacctttaaggaaaattatcggttccacgcaatcaacggatacattatggatacactccctggccttgtgatggctcaggaccaacgaatcaggtggtacctcctcagcatgggttctaatgagaacatacactccattcacttttcaggacatgtgttcactgtccggaagaaagaagagtataagatggccctctacaatttgtatccaggcgtgtttgagaccgttgaaatgcttccctctaaagctggcatctggagagtagagtgcttgatcggagaacatcttcacgcaggtatgagcaccttgttcctcgtgtacagcaacaaatgtcagaccccacttggcatggccagtggacacattcgcgactttcagatcacagcatctggccagtatggacaatgggccccaaagttggctcgcctccattactccggtagcataaatgcgtggtccactaaagaacctttcagctggattaaggtcgatcttcttgcccccatgatcatccacggcattaagacacagggagcgaggcagaaattctcctccctctacatctcacagttcattattatgtatagtttggacggcaagaagtggcaaacttatagaggtaacagtactggaacactcatggtgttcttcggcaacgttgatagctctggcatcaaacacaacatctttaatcctcccataatagctcggtacatcagattgcatccgacccactacagcattaggagtacactccgaatggagcttatgggttgcgacttgaattcctgttcaatgccactcggaatggagtctaaagccatctctgatgcacagataaccgccagtagctactttacgaacatgtttgctacgtggtcaccctctaaggcaaggcttcatttgcaaggccggtctaatgcctggagacctcaggtgaacaacccgaaagaatggctccaggtggactttcagaagaccatgaaagtaacaggtgtcactactcagggagttaagtccttgctcaccagcatgtatgtgaaggagttccttatttcctcatcacaagatggccaccagtggaccctcttctttcagaatggtaaggtcaaagtgtttcagggcaatcaagacagcttcacacccgtggtgaacagtcttgatcctccactcttgacacgataccttcgaatccatccacagtcttgggttcaccagattgcattgcgcatggaagtacttggatgcgaggctcaggacctctac

SEQ ID NO: 2758 - protein, 1457 aa, synthetic construct
  REGION 1..1457: note = Variant of human B-domain deleted Factor VIII
MQIELSTCFFLCLLRFCFSATRRYYLGAVELSWDYMQSDLGELPVDARFPPRVPKSFPFNTSLVYKKTLFVEFTDHLFNIAKPRPPWMGLLGPTIQAEVYDTVVITLKNMASHPVSLHAVGVSYWKASEGAEYDDQTSQREKEDDKVFPGGSHTYVWQVLKENGPMASDPLCLTYSYLSHVDLVKDLNSGLIGALLVCREGSLAKEKTQTLHKFILLFAVFDEGKSWHSETKNSLMQDRDAASARAWPKMHTVNGYVNRSLPGLIGCHRKSVYWHVIGMGTTPEVHSIFLEGHTFLVRNHRQASLEISPITFLTAQTLLMDLGQFLLFCHISSHQHDGMEAYVKVDSCPEEPQLRMKNNEEAEDYDDDLTDSEMDVVRFDDDNSPSFIQIRSVAKKHPKTWVHYIAAEEEDWDYAPLVLAPDDRSYKSQYLNNGPQRIGRKYKKVRFMAYTDETFKTREAIQHESGILGPLLYGEVGDTLLIIFKNQASRPYNIYPHGITDVRPLYSRRLPKGVKHLKDFPILPGEIFKYKWTVTVEDGPTKSDPRCLTRYYSSFVNMERDLASGLIGPLLICYKESVDQRGNQIMSDKRNVILFSVFDENRSWYLTENIQRFLPNPAGVQLEDPEFQASNIMHSINGYVFDSLQLSVCLHEVAYWYILSIGAQTDFLSVFFSGYTFKHKMVYEDTLTLFPFSGETVFMSMENPGLWILGCHNSDFRNRGMTALLKVSSCDKNTGDYYEDSYEDISAYLLSKNNAIEPRSFSQNPPVLKRHQREITRTTLQSDQEEIDYDDTISVEMKKEDFDIYDEDENQSPRSFQKKTRHYFIAAVERLWDYGMSSSPHVLRNRAQSGSVPQFKKVVFQEFTDGSFTQPLYRGELNEHLGLLGPYIRAEVEDNIMVTFRNQASRPYSFYSSLISYEEDQRQGAEPRKNFVKPNETKTYFWKVQHHMAPTKDEFDCKAWAYFSDVDLEKDVHSGLIGPLLVCHTNTLNPAHGRQVTVQEFALFFTIFDETKSWYFTENMERNCRAPCNIQMEDPTFKENYRFHAINGYIMDTLPGLVMAQDQRIRWYLLSMGSNENIHSIHFSGHVFTVRKKEEYKMALYNLYPGVFETVEMLPSKAGIWRVECLIGEHLHAGMSTLFLVYSNKCQTPLGMASGHIRDFQITASGQYGQWAPKLARLHYSGSINAWSTKEPFSWIKVDLLAPMIIHGIKTQGARQKFSSLYISQFIIMYSLDGKKWQTYRGNSTGTLMVFFGNVDSSGIKHNIFNPPIIARYIRLHPTHYSIRSTLRMELMGCDLNSCSMPLGMESKAISDAQITASSYFTNMFATWSPSKARLHLQGRSNAWRPQVNNPKEWLQVDFQKTMKVTGVTTQGVKSLLTSMYVKEFLISSSQDGHQWTLFFQNGKVKVFQGNQDSFTPVVNSLDPPLLTRYLRIHPQSWVHQIALRMEVLGCEAQDLY

SEQ ID NO: 2759 - DNA, 4371 bp, synthetic construct
  misc_feature 1..4371: note = Variant of human B-domain deleted Factor VIII
  source 1..4371: mol_type = other DNA
atgcagattgaactgtctacctgcttcttcctctgtttgctgaggttctgctttagcgccactagacggtactaccttggcgctgtggagctgtcctgggactatatgcagagtgatttgggagagcttcccgtcgacgcacgatttcctcctcgcgttccaaagtcatttcccttcaacacaagcgtggtgtacaagaagacgctcttcgtcgaattcaccgatcacctgttcaatatcgccaaacccagaccaccatggatgggtcttttggggcctaccatacaagcggaggtgtatgacacagttgttatcactctcaagaacatggcttctcatccggtaagtcttcacgcagtgggcgtgtcctactggaaagcttcagaaggagccgagtatgatgatcagacatcccagagggagaaagaagacgacaaggtatttccaggtgggtctcatacctatgtgtggcaagtgctcaaagagaatggccctatggcaagcgatccgctctgtttgacttacagctacctttcacacgttgacctcgtcaaggacctcaactccgggttgattggagccttgttggtatgcagggaaggatctcttgccaaagagaagacacagaccctccacaagtttatccttctctttgctgtgttcgatgagggcaaaagttggcatagcgaaacgaagaattccctcatgcaggatcgcgacgcagccagcgccagagcttggcccaagatgcacactgtgaacggatatgtcaataggtcacttcctggcttgattgggtgtcatcggaaaagtgtctactggcacgtgatcggaatggggacaacaccagaggtccactccatatttctcgaaggccataccttccttgttcgaaaccacagacaggcatccttggagatctctcccattacctttctcactgcccaaacgctccttatggacttgggtcagttccttctcttctgccatatcagctcacaccagcatgatggtatggaagcttatgtgaaagtcgacagttgtcctgaggagccacagttgcgcatgaagaataatgaagaagccgaggattacgacgacgatctcaccgattctgagatggacgtggtgaggtttgatgacgacaactctccctccttcattcaaatccggagcgtggcgaagaaacaccccaagacttgggtccactatatagcggcggaagaggaggattgggattacgctcctcttgtattggcaccagatgaccgctcatacaaaagccagtacctcaacaacggaccgcagagaattggccggaagtataagaaagtgcgatttatggcctatacagacgaaacctttaagacaagggaggccatccagcatgagagtgggattttgggacctcttctttacggcgaagttggtgataccctcctcatcatcttcaagaatcaagcttctcgcccctataacatttacccacacgggatcactgacgttaggcctttgtatagcagaagacttcccaaaggcgtgaagcatctcaaagacttccccattttgccaggcgagatctttaagtacaaatggaccgtcacagtggaagatggaccgactaaatcagaccctcgatgccttacgcggtactattcctccttcgtgaatatggagagagatttggcaagcggactcataggaccactcctcatctgttacaaggaatctgtagaccagaggggtaaccagattatgagtgataaacgcaatgtgatcctttttagcgtcttcgacgagaaccggtcctggtacttgaccgagaatatacaaaggttccttcccaaccccgcaggcgttcagttggaagaccctgagtttcaggccagcaatattatgcactcaatcaacggctatgtgtttgatagtctccagctttctgtttgcctccatgaagtagcctattggtacatcttgtcaattggtgctcaaacagacttcctctccgtcttcttctccggctacacctttaagcacaagatggtgtatgaggacactctcacactctttccattttctggagaaaccgtgttcatgagcatggagaatccaggcctttggatcttgggttgccacaacagtgattttcgcaatcggggaatgactgctctcctcaaagtcagcagctgtgataagaacacaggcgactattacgaagattcttacgaggacataagtgcctacttgccttccaagaataacgccattgagcccagatcattctcccagaatcctcccgtgcttaaaaggcatcagcgcgaaatcaccagaactactcttcagtctgatcaagaggagattgactatgacgacaccataagcgtggaaatgaagaaggaggatttcgatatctatgacgaagatgagaaccagtctccgcggagctttcagaagaagacgcgacactacttcattgcagcagtcgaaaggctttgggactacggtatgtcatcatcccctcatgtgttgcgcaatagagctcagagtggaagtgttccacagttcaagaaagtcgtctttcaagagtttacagatggcagcttcacacagcctctctatcggggcgagcttaacgaacatttgggactccttggtccctatatccgagccgaagtggaggacaacattatggttacctttaggaatcaagcctctcgcccctacagcttctactcctccctcatcagttatgaggaggatcagagacaaggcgctgaaccacggaagaactttgtgaaaccgaatgagacgaagacctacttctggaaagtacagcaccacatggcccccacaaaagacgaattcgattgcaaagcatgggcgtatttttcagacgttgacttggagaaagatgtacattcaggacttattggtcctttgttggtgtgtcacactaacactctcaatccagcccatggcaggcaggtgacagtccaggaattcgctcttttctttaccatctttgatgagaccaagtcctggtacttcacggaaaacatggagcgcaattgcagagccccctgtaacatacagatggaggaccctacctttaaggaaaattatcggttccacgcaatcaacggatacattatggatacactccctggccttgtgatggctcaggaccaacgaatcaggtggtacctcctcagcatgggttctaatgagaacatacactccattcacttttcaggacatgtgttcactgtccggaagaaagaagagtataagatggccctctacaatttgtatccaggcgtgtttgagaccgttgaaatgcttccctctaaagctggcatctggagagtagagtgcttgatcggagaacatcttcacgcaggtatgagcaccttgttcctcgtgtacagcaacaaatgtcagaccccacttggcatggccagtggacacattcgcgactttcagatcacagcatctggccagtatggacaatgggccccaaagttggctcgcctccattactccggtagcataaatgcgtggtccactaaagaacctttcagctggattaaggtcgatcttcttgcccccatgatcatccacggcattaagacacagggagcgaggcagaaattctcctccctctacatctcacagttcattattatgtatagtttggacggcaagaagtggcaaacttatagaggtaacagtactggaacactcatggtgttcttcggcaacgttgatagctctggcatcaaacacaacatctttaatcctcccataatagctcggtacatcagattgcatccgacccactacagcattaggagtacactccgaatggagcttatgggttgcgacttgaattcctgttcaatgccactcggaatggagtctaaagccatctctgatgcacagataaccgccagtagctactttacgaacatgtttgctacgtggtcaccctctaaggcaaggcttcatttgcaaggccggtctaatgcctggagacctcaggtgaacaacccgaaagaatggctccaggtggactttcagaagaccatgaaagtaacaggtgtcactactcagggagttaagtccttgctcaccagcatgtatgtgaaggagttccttatttcctcatcacaagatggccaccagtggaccctcttctttcagaatggtaaggtcaaagtgtttcagggcaatcaagacagcttcacacccgtggtgaacagtcttgatcctccactcttgacacgataccttcgaatccatccacagtcttgggttcaccagattgcattgcgcatggaagtacttggatgcgaggctcaggacctctac

SEQ ID NO: 2760 - protein, 1457 aa, synthetic construct
  REGION 1..1457: note = Variant of human B-domain deleted Factor VIII
MQIELSTCFFLCLLRFCFSATRRYYLGAVELSWDYMQSDLGELPVDARFPPRVPKSFPFNTSVVYKKTLFVEFTDHLFNIAKPRPPWMGLLGPTIQAEVYDTVVITLKNMASHPVSLHAVGVSYWKASEGAEYDDQTSQREKEDDKVFPGGSHTYVWQVLKENGPMASDPLCLTYSYLSHVDLVKDLNSGLIGALLVCREGSLAKEKTQTLHKFILLFAVFDEGKSWHSETKNSLMQDRDAASARAWPKMHTVNGYVNRSLPGLIGCHRKSVYWHVIGMGTTPEVHSIFLEGHTFLVRNHRQASLEISPITFLTAQTLLMDLGQFLLFCHISSHQHDGMEAYVKVDSCPEEPQLRMKNNEEAEDYDDDLTDSEMDVVRFDDDNSPSFIQIRSVAKKHPKTWVHYIAAEEEDWDYAPLVLAPDDRSYKSQYLNNGPQRIGRKYKKVRFMAYTDETFKTREAIQHESGILGPLLYGEVGDTLLIIFKNQASRPYNIYPHGITDVRPLYSRRLPKGVKHLKDFPILPGEIFKYKWTVTVEDGPTKSDPRCLTRYYSSFVNMERDLASGLIGPLLICYKESVDQRGNQIMSDKRNVILFSVFDENRSWYLTENIQRFLPNPAGVQLEDPEFQASNIMHSINGYVFDSLQLSVCLHEVAYWYILSIGAQTDFLSVFFSGYTFKHKMVYEDTLTLFPFSGETVFMSMENPGLWILGCHNSDFRNRGMTALLKVSSCDKNTGDYYEDSYEDISAYLPSKNNAIEPRSFSQNPPVLKRHQREITRTTLQSDQEEIDYDDTISVEMKKEDFDIYDEDENQSPRSFQKKTRHYFIAAVERLWDYGMSSSPHVLRNRAQSGSVPQFKKVVFQEFTDGSFTQPLYRGELNEHLGLLGPYIRAEVEDNIMVTFRNQASRPYSFYSSLISYEEDQRQGAEPRKNFVKPNETKTYFWKVQHHMAPTKDEFDCKAWAYFSDVDLEKDVHSGLIGPLLVCHTNTLNPAHGRQVTVQEFALFFTIFDETKSWYFTENMERNCRAPCNIQMEDPTFKENYRFHAINGYIMDTLPGLVMAQDQRIRWYLLSMGSNENIHSIHFSGHVFTVRKKEEYKMALYNLYPGVFETVEMLPSKAGIWRVECLIGEHLHAGMSTLFLVYSNKCQTPLGMASGHIRDFQITASGQYGQWAPKLARLHYSGSINAWSTKEPFSWIKVDLLAPMIIHGIKTQGARQKFSSLYISQFIIMYSLDGKKWQTYRGNSTGTLMVFFGNVDSSGIKHNIFNPPIIARYIRLHPTHYSIRSTLRMELMGCDLNSCSMPLGMESKAISDAQITASSYFTNMFATWSPSKARLHLQGRSNAWRPQVNNPKEWLQVDFQKTMKVTGVTTQGVKSLLTSMYVKEFLISSSQDGHQWTLFFQNGKVKVFQGNQDSFTPVVNSLDPPLLTRYLRIHPQSWVHQIALRMEVLGCEAQDLY

SEQ ID NO: 2761 - DNA, 4371 bp, synthetic construct
  misc_feature 1..4371: note = Variant of human B-domain deleted Factor VIII
  source 1..4371: mol_type = other DNA
atgcagattgaactgtctacctgcttcttcctctgtttgctgaggttctgctttagcgccactagacggtactaccttggcgctgtggagctgtcctgggactatatgcagagtgatttgggagagcttcccgtcgacgcacgatttcctcctcgcgttccaaagtcatttcccttcaacacaagcgtggtgtacaagaagacgctcttcgtcgaattcaccgatcacctgttcaatatcgccaaacccagaccaccatggatgggtcttttggggcctaccatacaagcggaggtgtatgacacagttgttatcactctcaagaacatggcttctcatccggtaagtcttcacgcagtgggcgtgtcctactggaaagcttcagaaggagccgagtatgatgatcagacatcccagagggagaaagaagacgacaaggtatttccaggtgggtctcatacctatgtgtggcaagtgctcaaagagaatggccctatggcaagcgatccgctctgtttgacttacagctacctttcacacgttgacctcgtcaaggacctcaactccgggttgattggagccttgttggtatgcagggaaggatctcttgccaaagagaagacacagaccctccacaagtttatccttctctttgctgtgttcgatgagggcaaaagttggcatagcgaaacgaagaattccctcatgcaggatcgcgacgcagccagcgccagagcttggcccaagatgcacactgtgaacggatatgtcaataggtcacttcctggcttgattgggtgtcatcggaaaagtgtctactggcacgtgatcggaatggggacaacaccagaggtccactccatatttctcgaaggccataccttccttgttcgaaaccacagacaggcatccttggagatctctcccattacctttctcactgcccaaacgctccttatggacttgggtcagttccttctcttctgccatatcagctcacaccagcatgatggtatggaagcttatgtgaaagtcgacagttgtcctgaggagccacagttgcgcatgaagaataatgaagaagccgaggattacgacgacgatctcaccgattctgagatggacgtggtgaggtttgatgacgacaactctccctccttcattcaaatccggagctttgcgaagaaacaccccaagacttgggtccactatatagcggcggaagaggaggattgggattacgctcctcttgtattggcaccagatgaccgctcatacaaaagccagtacctcaacaacggaccgcagagaattggccggaagtataagaaagtgcgatttatggcctatacagacgaaacctttaagacaagggaggccatccagcatgagagtgggattttgggacctcttctttacggcgaagttggtgataccctcctcatcatcttcaagaatcaagcttctcgcccctataacatttacccacacgggatcactgacgttaggcctttgtatagcagaagacttcccaaaggcgtgaagcatctcaaagacttccccattttgccaggcgagatctttaagtacaaatggaccgtcacagtggaagatggaccgactaaatcagaccctcgatgccttacgcggtactattcctccttcgtgaatatggagagagatttggcaagcggactcataggaccactcctcatctgttacaaggaatctgtagaccagaggggtaaccagattatgagtgataaacgcaatgtgatcctttttagcgtcttcgacgagaaccggtcctggtacttgaccgagaatatacaaaggttccttcccaaccccgcaggcgttcagttggaagaccctgagtttcaggccagcaatattatgcactcaatcaacggctatgtgtttgatagtctccagctttctgtttgcctccatgaagtagcctattggtacatcttgtcaattggtgctcaaacagacttcctctccgtcttcttctccggctacacctttaagcacaagatggtgtatgaggacactctcacactctttccattttctggagaaaccgtgttcatgagcatggagaatccaggcctttggatcttgggttgccacaacagtgattttcgcaatcggggaatgactgctctcctcaaagtcagcagctgtgataagaacacaggcgactattacgaagattcttacgaggacataagtgcctacttgttgtccaagaataacgccattgagcccagatcattctcccagaatcctcccgtgcttaaaaggcatcagcgcgaaatcaccagaactactcttcagtctgatcaagaggagattgactatgacgacaccataagcgtggaaatgaagaaggaggatttcgatatctatgacgaagatgagaaccagtctccgcggagctttcagaagaagacgcgacactacttcattgcagcagtcgaaaggctttgggactacggtatgtcatcatcccctcatgtgttgcgcaatagagctcagagtggaagtgttccacagttcaagaaagtcgtctttcaagagtttacagatggcagcttcacacagcctctctatcggggcgagcttaacgaacatttgggactccttggtccctatatccgagccgaagtggaggacaacattatggttacctttaggaatcaagcctctcgcccctacagcttctactcctccctcatcagttatgaggaggatcagagacaaggcgctgaaccacggaagaactttgtgaaaccgaatgagacgaagacctacttctggaaagtacagcaccacatggcccccacaaaagacgaattcgattgcaaagcatgggcgtatttttcagacgttgacttggagaaagatgtacattcaggacttattggtcctttgttggtgtgtcacactaacactctcaatccagcccatggcaggcaggtgacagtccaggaattcgctcttttctttaccatctttgatgagaccaagtcctggtacttcacggaaaacatggagcgcaattgcagagccccctgtaacatacagatggaggaccctacctttaaggaaaattatcggttccacgcaatcaacggatacattatggatacactccctggccttgtgatggctcaggaccaacgaatcaggtggtacctcctcagcatgggttctaatgagaacatacactccattcacttttcaggacatgtgttcactgtccggaagaaagaagagtataagatggccctctacaatttgtatccaggcgtgtttgagaccgttgaaatgcttccctctaaagctggcatctggagagtagagtgcttgatcggagaacatcttcacgcaggtatgagcaccttgttcctcgtgtacagcaacaaatgtcagaccccacttggcatggccagtggacacattcgcgactttcagatcacagcatctggccagtatggacaatgggccccaaagttggctcgcctccattactccggtagcataaatgcgtggtccactaaagaacctttcagctggattaaggtcgatcttcttgcccccatgatcatccacggcattaagacacagggagcgaggcagaaattctcctccctctacatctcacagttcattattatgtatagtttggacggcaagaagtggcaaacttatagaggtaacagtactggaacactcatggtgttcttcggcaacgttgatagctctggcatcaaacacaacatctttaatcctcccataatagctcggtacatcagattgcatccgacccactacagcattaggagtacactccgaatggagcttatgggttgcgacttgaattcctgttcaatgccactcggaatggagtctaaagccatctctgatgcacagataaccgccagtagctactttacgaacatgtttgctacgtggtcaccctctaaggcaaggcttcatttgcaaggccggtctaatgcctggagacctcaggtgaacaacccgaaagaatggctccaggtggactttcagaagaccatgaaagtaacaggtgtcactactcagggagttaagtccttgctcaccagcatgtatgtgaaggagttccttatttcctcatcacaagatggccaccagtggaccctcttctttcagaatggtaaggtcaaagtgtttcagggcaatcaagacagcttcacacccgtggtgaacagtcttgatcctccactcttgacacgataccttcgaatccatccacagtcttgggttcaccagattgcattgcgcatggaagtacttggatgcgaggctcaggacctctac

SEQ ID NO: 2762 - protein, 1457 aa, synthetic construct
  REGION 1..1457: note = Variant of human B-domain deleted Factor VIII
MQIELSTCFFLCLLRFCFSATRRYYLGAVELSWDYMQSDLGELPVDARFPPRVPKSFPFNTSVVYKKTLFVEFTDHLFNIAKPRPPWMGLLGPTIQAEVYDTVVITLKNMASHPVSLHAVGVSYWKASEGAEYDDQTSQREKEDDKVFPGGSHTYVWQVLKENGPMASDPLCLTYSYLSHVDLVKDLNSGLIGALLVCREGSLAKEKTQTLHKFILLFAVFDEGKSWHSETKNSLMQDRDAASARAWPKMHTVNGYVNRSLPGLIGCHRKSVYWHVIGMGTTPEVHSIFLEGHTFLVRNHRQASLEISPITFLTAQTLLMDLGQFLLFCHISSHQHDGMEAYVKVDSCPEEPQLRMKNNEEAEDYDDDLTDSEMDVVRFDDDNSPSFIQIRSFAKKHPKTWVHYIAAEEEDWDYAPLVLAPDDRSYKSQYLNNGPQRIGRKYKKVRFMAYTDETFKTREAIQHESGILGPLLYGEVGDTLLIIFKNQASRPYNIYPHGITDVRPLYSRRLPKGVKHLKDFPILPGEIFKYKWTVTVEDGPTKSDPRCLTRYYSSFVNMERDLASGLIGPLLICYKESVDQRGNQIMSDKRNVILFSVFDENRSWYLTENIQRFLPNPAGVQLEDPEFQASNIMHSINGYVFDSLQLSVCLHEVAYWYILSIGAQTDFLSVFFSGYTFKHKMVYEDTLTLFPFSGETVFMSMENPGLWILGCHNSDFRNRGMTALLKVSSCDKNTGDYYEDSYEDISAYLLSKNNAIEPRSFSQNPPVLKRHQREITRTTLQSDQEEIDYDDTISVEMKKEDFDIYDEDENQSPRSFQKKTRHYFIAAVERLWDYGMSSSPHVLRNRAQSGSVPQFKKVVFQEFTDGSFTQPLYRGELNEHLGLLGPYIRAEVEDNIMVTFRNQASRPYSFYSSLISYEEDQRQGAEPRKNFVKPNETKTYFWKVQHHMAPTKDEFDCKAWAYFSDVDLEKDVHSGLIGPLLVCHTNTLNPAHGRQVTVQEFALFFTIFDETKSWYFTENMERNCRAPCNIQMEDPTFKENYRFHAINGYIMDTLPGLVMAQDQRIRWYLLSMGSNENIHSIHFSGHVFTVRKKEEYKMALYNLYPGVFETVEMLPSKAGIWRVECLIGEHLHAGMSTLFLVYSNKCQTPLGMASGHIRDFQITASGQYGQWAPKLARLHYSGSINAWSTKEPFSWIKVDLLAPMIIHGIKTQGARQKFSSLYISQFIIMYSLDGKKWQTYRGNSTGTLMVFFGNVDSSGIKHNIFNPPIIARYIRLHPTHYSIRSTLRMELMGCDLNSCSMPLGMESKAISDAQITASSYFTNMFATWSPSKARLHLQGRSNAWRPQVNNPKEWLQVDFQKTMKVTGVTTQGVKSLLTSMYVKEFLISSSQDGHQWTLFFQNGKVKVFQGNQDSFTPVVNSLDPPLLTRYLRIHPQSWVHQIALRMEVLGCEAQDLY

SEQ ID NO: 2763 - DNA, 4371 bp, synthetic construct
  misc_feature 1..4371: note = Variant of human B-domain deleted Factor VIII
  source 1..4371: mol_type = other DNA
atgcagattgaactgtctacctgcttcttcctctgtttgctgaggttctgctttagcgccactagacggtactaccttggcgctgtggagctgtcctgggactatatgcagagtgatttgggagagcttcccgtcgacgcacgatttcctcctcgcgttccaaagtcatttcccttcaacacaagcgtggtgtacaagaagacgctcttcgtcgaattcaccgatcacctgttcaatatcgccaaacccagaccaccatggatgggtcttttggggcctaccatacaagcggaggtgtatgacacagttgttatcactctcaagaacatggcttctcatccggtaagtcttcacgcagtgggcgtgtcctactggaaagcttcagaaggagccgagtatgatgatcagacatcccagagggagaaagaagacgacaaggtatttccaggtgggtctcatacctatgtgtggcaagtgctcaaagagaatggccctatggcaagcgatccgctctgtttgacttacagctacctttcacacgttgacctcgtcaaggacctcaactccgggttgattggagccttgttggtatgcagggaaggatctcttgccaaagagaagacacagaccctccacaagtttatccttctctttgctgtgttcgatgagggcaaaagttggcatagcgaaacgaagaattccctcatgcaggatcgcgacgcagccagcgccagagcttggcccaagatgcacactgtgaacggatatgtcaataggtcacttcctggcttgattgggtgtcatcggaaaagtgtctactggcacgtgatcggaatggggacaacaccagaggtccactccatatttctcgaaggccataccttccttgttcgaaaccacagacaggcatccttggagatctctcccattacctttctcactgcccaaacgctccttccggacttgggtcagttccttctcttctgccatatcagctcacaccagcatgatggtatggaagcttatgtgaaagtcgacagttgtcctgaggagccacagttgcgcatgaagaataatgaagaagccgaggattacgacgacgatctcaccgattctgagatggacgtggtgaggtttgatgacgacaactctccctccttcattcaaatccggagcgtggcgaagaaacaccccaagacttgggtccactatatagcggcggaagaggaggattgggattacgctcctcttgtattggcaccagatgaccgctcatacaaaagccagtacctcaacaacggaccgcagagaattggccggaagtataagaaagtgcgatttatggcctatacagacgaaacctttaagacaagggaggccatccagcatgagagtgggattttgggacctcttctttacggcgaagttggtgataccctcctcatcatcttcaagaatcaagcttctcgcccctataacatttacccacacgggatcactgacgttaggcctttgtatagcagaagacttcccaaaggcgtgaagcatctcaaagacttccccattttgccaggcgagatctttaagtacaaatggaccgtcacagtggaagatggaccgactaaatcagaccctcgatgccttacgcggtactattcctccttcgtgaatatggagagagatttggcaagcggactcataggaccactcctcatctgttacaaggaatctgtagaccagaggggtaaccagattatgagtgataaacgcaatgtgatcctttttagcgtcttcgacgagaaccggtcctggtacttgaccgagaatatacaaaggttccttcccaaccccgcaggcgttcagttggaagaccctgagtttcaggccagcaatattatgcactcaatcaacggctatgtgtttgatagtctccagctttctgtttgcctccatgaagtagcctattggtacatcttgtcaattggtgctcaaacagacttcctctccgtcttcttctccggctacacctttaagcacaagatggtgtatgaggacactctcacactctttccattttctggagaaaccgtgttcatgagcatggagaatccaggcctttggatcttgggttgccacaacagtgattttcgcaatcggggaatgactgctctcctcaaagtcagcagctgtgataagaacacaggcgactattacgaagattcttacgaggacataagtgcctacttgttgtccaagaataacgccattgagcccagatcattctcccagaatcctcccgtgcttaaaaggcatcagcgcgaaatcaccagaactactcttcagtctgatcaagaggagattgactatgacgacaccataagcgtggaaatgaagaaggaggatttcgatatctatgacgaagatgagaaccagtctccgcggagctttcagaagaagacgcgacactacttcattgcagcagtcgaaaggctttgggactacggtatgtcatcatcccctcatgtgttgcgcaatagagctcagagtggaagtgttccacagttcaagaaagtcgtctttcaagagtttacagatggcagcttcacacagcctctctatcggggcgagcttaacgaacatttgggactccttggtccctatatccgagccgaagtggaggacaacattatggttacctttaggaatcaagcctctcgcccctacagcttctactcctccctcatcagttatgaggaggatcagagacaaggcgctgaaccacggaagaactttgtgaaaccgaatgagacgaagacctacttctggaaagtacagcaccacatggcccccacaaaagacgaattcgattgcaaagcatgggcgtatttttcagacgttgacttggagaaagatgtacattcaggacttattggtcctttgttggtgtgtcacactaacactctcaatccagcccatggcaggcaggtgacagtccaggaattcgctcttttctttaccatctttgatgagaccaagtcctggtacttcacggaaaacatggagcgcaattgcagagccccctgtaacatacagatggaggaccctacctttaaggaaaattatcggttccacgcaatcaacggatacattatggatacactccctggccttgtgatggctcaggaccaacgaatcaggtggtacctcctcagcatgggttctaatgagaacatacactccattcacttttcaggacatgtgttcactgtccggaagaaagaagagtataagatggccctctacaatttgtatccaggcgtgtttgagaccgttgaaatgcttccctctaaagctggcatctggagagtagagtgcttgatcggagaacatcttcacgcaggtatgagcaccttgttcctcgtgtacagcaacaaatgtcagaccccacttggcatggccagtggacacattcgcgactttcagatcacagcatctggccagtatggacaatgggccccaaagttggctcgcctccattactccggtagcataaatgcgtggtccactaaagaacctttcagctggattaaggtcgatcttcttgcccccatgatcatccacggcattaagacacagggagcgaggcagaaattctcctccctctacatctcacagttcattattatgtatagtttggacggcaagaagtggcaaacttatagaggtaacagtactggaacactcatggtgttcttcggcaacgttgatagctctggcatcaaacacaacatctttaatcctcccataatagctcggtacatcagattgcatccgacccactacagcattaggagtacactccgaatggagcttatgggttgcgacttgaattcctgttcaatgccactcggaatggagtctaaagccatctctgatgcacagataaccgccagtagctactttacgaacatgtttgctacgtggtcaccctctaaggcaaggcttcatttgcaaggccggtctaatgcctggagacctcaggtgaacaacccgaaagaatggctccaggtggactttcagaagaccatgaaagtaacaggtgtcactactcagggagttaagtccttgctcaccagcatgtatgtgaaggagttccttatttcctcatcacaagatggccaccagtggaccctcttctttcagaatggtaaggtcaaagtgtttcagggcaatcaagacagcttcacacccgtggtgaacagtcttgatcctccactcttgacacgataccttcgaatccatccacagtcttgggttcaccagattgcattgcgcatggaagtacttggatgcgaggctcaggacctctac

SEQ ID NO: 2764 - protein, 1457 aa, synthetic construct
  REGION 1..1457: note = Variant of human B-domain deleted Factor VIII
MQIELSTCFFLCLLRFCFSATRRYYLGAVELSWDYMQSDLGELPVDARFPPRVPKSFPFNTSVVYKKTLFVEFTDHLFNIAKPRPPWMGLLGPTIQAEVYDTVVITLKNMASHPVSLHAVGVSYWKASEGAEYDDQTSQREKEDDKVFPGGSHTYVWQVLKENGPMASDPLCLTYSYLSHVDLVKDLNSGLIGALLVCREGSLAKEKTQTLHKFILLFAVFDEGKSWHSETKNSLMQDRDAASARAWPKMHTVNGYVNRSLPGLIGCHRKSVYWHVIGMGTTPEVHSIFLEGHTFLVRNHRQASLEISPITFLTAQTLLPDLGQFLLFCHISSHQHDGMEAYVKVDSCPEEPQLRMKNNEEAEDYDDDLTDSEMDVVRFDDDNSPSFIQIRSVAKKHPKTWVHYIAAEEEDWDYAPLVLAPDDRSYKSQYLNNGPQRIGRKYKKVRFMAYTDETFKTREAIQHESGILGPLLYGEVGDTLLIIFKNQASRPYNIYPHGITDVRPLYSRRLPKGVKHLKDFPILPGEIFKYKWTVTVEDGPTKSDPRCLTRYYSSFVNMERDLASGLIGPLLICYKESVDQRGNQIMSDKRNVILFSVFDENRSWYLTENIQRFLPNPAGVQLEDPEFQASNIMHSINGYVFDSLQLSVCLHEVAYWYILSIGAQTDFLSVFFSGYTFKHKMVYEDTLTLFPFSGETVFMSMENPGLWILGCHNSDFRNRGMTALLKVSSCDKNTGDYYEDSYEDISAYLLSKNNAIEPRSFSQNPPVLKRHQREITRTTLQSDQEEIDYDDTISVEMKKEDFDIYDEDENQSPRSFQKKTRHYFIAAVERLWDYGMSSSPHVLRNRAQSGSVPQFKKVVFQEFTDGSFTQPLYRGELNEHLGLLGPYIRAEVEDNIMVTFRNQASRPYSFYSSLISYEEDQRQGAEPRKNFVKPNETKTYFWKVQHHMAPTKDEFDCKAWAYFSDVDLEKDVHSGLIGPLLVCHTNTLNPAHGRQVTVQEFALFFTIFDETKSWYFTENMERNCRAPCNIQMEDPTFKENYRFHAINGYIMDTLPGLVMAQDQRIRWYLLSMGSNENIHSIHFSGHVFTVRKKEEYKMALYNLYPGVFETVEMLPSKAGIWRVECLIGEHLHAGMSTLFLVYSNKCQTPLGMASGHIRDFQITASGQYGQWAPKLARLHYSGSINAWSTKEPFSWIKVDLLAPMIIHGIKTQGARQKFSSLYISQFIIMYSLDGKKWQTYRGNSTGTLMVFFGNVDSSGIKHNIFNPPIIARYIRLHPTHYSIRSTLRMELMGCDLNSCSMPLGMESKAISDAQITASSYFTNMFATWSPSKARLHLQGRSNAWRPQVNNPKEWLQVDFQKTMKVTGVTTQGVKSLLTSMYVKEFLISSSQDGHQWTLFFQNGKVKVFQGNQDSFTPVVNSLDPPLLTRYLRIHPQSWVHQIALRMEVLGCEAQDLY

SEQ ID NO: 2765 - DNA, 4371 bp, synthetic construct
  misc_feature 1..4371: note = Variant of human B-domain deleted Factor VIII
  source 1..4371: mol_type = other DNA
atgcagattgaactgtctacctgcttcttcctctgtttgctgaggttctgctttagcgccactagacggtactaccttggcgctgtggagctgtcctgggactatatgcagagtgatttgggagagcttcccgtcgacgcacgatttcctcctcgcgttccaaagtcatttcccttcaacacaagcgtggtgtacaagaagacgctcttcgtcgaattcaccgatcacctgttcaatatcgccaaacccagaccaccatggatgggtcttttggggcctaccatacaagcggaggtgtatgacacagttgttatcactctcaagaacatggcttctcatccggtaagtcttcacgcagtgggcgtgtcctactggaaagcttcagaaggagccgagtatgatgatcagacatcccagagggagaaagaagacgacaaggtatttccaggtgggtctcatacctatgtgtggcaagtgctcaaagagaatggccctatggcaagcgatccgctctgtttgacttacagctacctttcacacgttgacctcgtcaaggacctcaactccgggttgattggagccttgttggtatgcagggaaggatctcttgccaaagagaagacacagaccctccacaagtttatccttctctttgctgtgttcgatgagggcaaaagttggcatagcgaaacgaagaattccctcatgcaggatcgcgacgcagccagcgccagagcttggcccaagatgcacactgtgaacggatatgtcaataggtcacttcctggcttgattgggtgtcatcggaaaagtgtctactggcacgtgatcggaatggggacaacaccagaggtccactccatatttctcgaaggccataccttccttgttcgaaaccacagacaggcatccttggagatctctcccattacctttctcactgcccaaacgctccttatggacttgggtcagttccttctcttctgccatatcagctcacaccagcatgatggtatggaagcttatgtgaaagtcgacagttgtcctgaggagccacagttgcgcatgaagaataatgaagaagccgaggattacgacgacgatctcaccgattctgagatggacgtggtgaggtttgatgacgacaactctccctccttcattcaaatccggagcggggcgaagaaacaccccaagacttgggtccactatatagcggcggaagaggaggattgggattacgctcctcttgtattggcaccagatgaccgctcatacaaaagccagtacctcaacaacggaccgcagagaattggccggaagtataagaaagtgcgatttatggcctatacagacgaaacctttaagacaagggaggccatccagcatgagagtgggattttgggacctcttctttacggcgaagttggtgataccctcctcatcatcttcaagaatcaagcttctcgcccctataacatttacccacacgggatcactgacgttaggcctttgtatagcagaagacttcccaaaggcgtgaagcatctcaaagacttccccattttgccaggcgagatctttaagtacaaatggaccgtcacagtggaagatggaccgactaaatcagaccctcgatgccttacgcggtactattcctccttcgtgaatatggagagagatttggcaagcggactcataggaccactcctcatctgttacaaggaatctgtagaccagaggggtaaccagattatgagtgataaacgcaatgtgatcctttttagcgtcttcgacgagaaccggtcctggtacttgaccgagaatatacaaaggttccttcccaaccccgcaggcgttcagttggaagaccctgagtttcaggccagcaatattatgcactcaatcaacggctatgtgtttgatagtctccagctttctgtttgcctccatgaagtagcctattggtacatcttgtcaattggtgctcaaacagacttcctctccgtcttcttctccggctacacctttaagcacaagatggtgtatgaggacactctcacactctttccattttctggagaaaccgtgttcatgagcatggagaatccaggcctttggatcttgggttgccacaacagtgattttcgcaatcggggaatgactgctctcctcaaagtcagcagctgtgataagaacacaggcgactattacgaagattcttacgaggacataagtgcctacttgttgtccaagaataacgccattgagcccagatcattctcccagaatcctcccgtgcttaaaaggcatcagcgcgaaatcaccagaactactcttcagtctgatcaagaggagattgactatgacgacaccataagcgtggaaatgaagaaggaggatttcgatatctatgacgaagatgagaaccagtctccgcggagctttcagaagaagacgcgacactacttcattgcagcagtcgaaaggctttgggactacggtatgtcatcatcccctcatgtgttgcgcaatagagctcagagtggaagtgttccacagttcaagaaagtcgtctttcaagagtttacagatggcagcttcacacagcctctctatcggggcgagcttaacgaacatttgggactccttggtccctatatccgagccgaagtggaggacaacattatggttacctttaggaatcaagcctctcgcccctacagcttctactcctccctcatcagttatgaggaggatcagagacaaggcgctgaaccacggaagaactttgtgaaaccgaatgagacgaagacctacttctggaaagtacagcaccacatggcccccacaaaagacgaattcgattgcaaagcatgggcgtatttttcagacgttgacttggagaaagatgtacattcaggacttattggtcctttgttggtgtgtcacactaacactctcaatccagcccatggcaggcaggtgacagtccaggaattcgctcttttctttaccatctttgatgagaccaagtcctggtacttcacggaaaacatggagcgcaattgcagagccccctgtaacatacagatggaggaccctacctttaaggaaaattatcggttccacgcaatcaacggatacattatggatacactccctggccttgtgatggctcaggaccaacgaatcaggtggtacctcctcagcatgggttctaatgagaacatacactccattcacttttcaggacatgtgttcactgtccggaagaaagaagagtataagatggccctctacaatttgtatccaggcgtgtttgagaccgttgaaatgcttccctctaaagctggcatctggagagtagagtgcttgatcggagaacatcttcacgcaggtatgagcaccttgttcctcgtgtacagcaacaaatgtcagaccccacttggcatggccagtggacacattcgcgactttcagatcacagcatctggccagtatggacaatgggccccaaagttggctcgcctccattactccggtagcataaatgcgtggtccactaaagaacctttcagctggattaaggtcgatcttcttgcccccatgatcatccacggcattaagacacagggagcgaggcagaaattctcctccctctacatctcacagttcattattatgtatagtttggacggcaagaagtggcaaacttatagaggtaacagtactggaacactcatggtgttcttcggcaacgttgatagctctggcatcaaacacaacatctttaatcctcccataatagctcggtacatcagattgcatccgacccactacagcattaggagtacactccgaatggagcttatgggttgcgacttgaattcctgttcaatgccactcggaatggagtctaaagccatctctgatgcacagataaccgccagtagctactttacgaacatgtttgctacgtggtcaccctctaaggcaaggcttcatttgcaaggccggtctaatgcctggagacctcaggtgaacaacccgaaagaatggctccaggtggactttcagaagaccatgaaagtaacaggtgtcactactcagggagttaagtccttgctcaccagcatgtatgtgaaggagttccttatttcctcatcacaagatggccaccagtggaccctcttctttcagaatggtaaggtcaaagtgtttcagggcaatcaagacagcttcacacccgtggtgaacagtcttgatcctccactcttgacacgataccttcgaatccatccacagtcttgggttcaccagattgcattgcgcatggaagtacttggatgcgaggctcaggacctctac

SEQ ID NO: 2766 - protein, 1457 aa, synthetic construct
  REGION 1..1457: note = Variant of human B-domain deleted Factor VIII
MQIELSTCFFLCLLRFCFSATRRYYLGAVELSWDYMQSDLGELPVDARFPPRVPKSFPFNTSVVYKKTLFVEFTDHLFNIAKPRPPWMGLLGPTIQAEVYDTVVITLKNMASHPVSLHAVGVSYWKASEGAEYDDQTSQREKEDDKVFPGGSHTYVWQVLKENGPMASDPLCLTYSYLSHVDLVKDLNSGLIGALLVCREGSLAKEKTQTLHKFILLFAVFDEGKSWHSETKNSLMQDRDAASARAWPKMHTVNGYVNRSLPGLIGCHRKSVYWHVIGMGTTPEVHSIFLEGHTFLVRNHRQASLEISPITFLTAQTLLMDLGQFLLFCHISSHQHDGMEAYVKVDSCPEEPQLRMKNNEEAEDYDDDLTDSEMDVVRFDDDNSPSFIQIRSGAKKHPKTWVHYIAAEEEDWDYAPLVLAPDDRSYKSQYLNNGPQRIGRKYKKVRFMAYTDETFKTREAIQHESGILGPLLYGEVGDTLLIIFKNQASRPYNIYPHGITDVRPLYSRRLPKGVKHLKDFPILPGEIFKYKWTVTVEDGPTKSDPRCLTRYYSSFVNMERDLASGLIGPLLICYKESVDQRGNQIMSDKRNVILFSVFDENRSWYLTENIQRFLPNPAGVQLEDPEFQASNIMHSINGYVFDSLQLSVCLHEVAYWYILSIGAQTDFLSVFFSGYTFKHKMVYEDTLTLFPFSGETVFMSMENPGLWILGCHNSDFRNRGMTALLKVSSCDKNTGDYYEDSYEDISAYLLSKNNAIEPRSFSQNPPVLKRHQREITRTTLQSDQEEIDYDDTISVEMKKEDFDIYDEDENQSPRSFQKKTRHYFIAAVERLWDYGMSSSPHVLRNRAQSGSVPQFKKVVFQEFTDGSFTQPLYRGELNEHLGLLGPYIRAEVEDNIMVTFRNQASRPYSFYSSLISYEEDQRQGAEPRKNFVKPNETKTYFWKVQHHMAPTKDEFDCKAWAYFSDVDLEKDVHSGLIGPLLVCHTNTLNPAHGRQVTVQEFALFFTIFDETKSWYFTENMERNCRAPCNIQMEDPTFKENYRFHAINGYIMDTLPGLVMAQDQRIRWYLLSMGSNENIHSIHFSGHVFTVRKKEEYKMALYNLYPGVFETVEMLPSKAGIWRVECLIGEHLHAGMSTLFLVYSNKCQTPLGMASGHIRDFQITASGQYGQWAPKLARLHYSGSINAWSTKEPFSWIKVDLLAPMIIHGIKTQGARQKFSSLYISQFIIMYSLDGKKWQTYRGNSTGTLMVFFGNVDSSGIKHNIFNPPIIARYIRLHPTHYSIRSTLRMELMGCDLNSCSMPLGMESKAISDAQITASSYFTNMFATWSPSKARLHLQGRSNAWRPQVNNPKEWLQVDFQKTMKVTGVTTQGVKSLLTSMYVKEFLISSSQDGHQWTLFFQNGKVKVFQGNQDSFTPVVNSLDPPLLTRYLRIHPQSWVHQIALRMEVLGCEAQDLY

SEQ ID NO: 2767 - DNA, 4371 bp, synthetic construct
  misc_feature 1..4371: note = Variant of human B-domain deleted Factor VIII
  source 1..4371: mol_type = other DNA
atgcagattgaactgtctacctgcttcttcctctgtttgctgaggttctgctttagcgccactagacggtactaccttggcgctgtggagctgtcctgggactatatgcagagtgatttgggagagcttcccgtcgacgcacgatttcctcctcgcgttccaaagtcatttcccttcaacacaagcgtggtgtacaagaagacgctcttcgtcgaattcaccgatcacctgttcaatatcgccaaacccagaccaccatggatgggtcttttggggcctaccatacaagcggaggtgtatgacacagttgttatcactctcaagaacatggcttctcatccggtaagtcttcacgcagtgggcgtgtcctactggaaagcttcagaaggagccgagtatgatgatcagacatcccagagggagaaagaagacgacaaggtatttccaggtgggtctcatacctatgtgtggcaagtgctcaaagagaatggccctatggcaagcgatccgctctgtttgacttacagctacctttcacacgttgacctcgtcaaggacctcaactccgggttgattggagccttgttggtatgcagggaaggatctcttgccaaagagaagacacagaccctccacaagtttatccttctctttgctgtgttcgatgagggcaaaagttggcatagcgaaacgaagaattccctcatgcaggatcgcgacgcagccagcgccagagcttggcccaagatgcacactgtgaacggatatgtcaataggtcacttcctggcttgattgggtgtcatcggaaaagtgtctactggcacgtgatcggaatggggacaacaccagaggtccactccatatttctcgaaggccataccttccttgttcgaaaccacagacaggcatccttggagatctctcccattacctttctcactgcccaaacgctccttatggacttgggtcagttccttctcttctgccatatcagctcacaccagcatgatggtatggaagcttatgtgaaagtcgacagttgtcctgaggagccacagttgcgcatgaagaataatgaagaagccgaggattacgacgacgatctcaccgattctgagatggacgtggtgaggtttgatgacgacaactctccctccttcattcaaatccggagcgtggcgaagaaacaccccaagacttgggtccactatatagcggcggaagaggaggattgggattacgctcctcttgtattggcaccagatgaccgctcatacaaaagccagtacctcaacaacggaccgcagagaattggccggaagtataagaaagtgcgatttatggcctatacagacgaaacctttaagacaagggaggccatccagcatgagagtgggattttgggacctcttctttacggcgaagttggtgataccctcctcatcatcttcaagaatcaagcttctcgcccctataacatttacccacacgggatcactgacgttaggcctttgtatagcagaagacttcccaaaggcgtgaagcatctcaaagacttccccattttgccaggcgagatctttaagtacaaatggaccgtcacagtggaagatggaccgactaaatcagaccctcgatgccttacgcggtactattcctccttcgtgaatatggagagagatttggcaagcggactcataggaccactcctcatctgttacaaggaatctgtagaccagaggggtaaccagattatgagtgataaacgcaatgtgatcctttttagcgtcttcgacgagaaccggtcctggtacttgaccgagaatatacaaaggttccttcccaaccccgcaggcgttcagttggaagaccctgagtttcaggccagcaatattatgcactcaatcaacggctatgtgtttgatagtctccagctttctgtttgcctccatgaagtagcctattggtacatcttgtcaattggtgctcaaacagacttcctctccgtcttcttctccggctacacctttaagcacaagatggtgtatgaggacactctcacactctttccattttctggagaaaccgtgttcatgacgatggagaatccaggcctttggatcttgggttgccacaacagtgattttcgcaatcggggaatgactgctctcctcaaagtcagcagctgtgataagaacacaggcgactattacgaagattcttacgaggacataagtgcctacttgttgtccaagaataacgccattgagcccagatcattctcccagaatcctcccgtgcttaaaaggcatcagcgcgaaatcaccagaactactcttcagtctgatcaagaggagattgactatgacgacaccataagcgtggaaatgaagaaggaggatttcgatatctatgacgaagatgagaaccagtctccgcggagctttcagaagaagacgcgacactacttcattgcagcagtcgaaaggctttgggactacggtatgtcatcatcccctcatgtgttgcgcaatagagctcagagtggaagtgttccacagttcaagaaagtcgtctttcaagagtttacagatggcagcttcacacagcctctctatcggggcgagcttaacgaacatttgggactccttggtccctatatccgagccgaagtggaggacaacattatggttacctttaggaatcaagcctctcgcccctacagcttctactcctccctcatcagttatgaggaggatcagagacaaggcgctgaaccacggaagaactttgtgaaaccgaatgagacgaagacctacttctggaaagtacagcaccacatggcccccacaaaagacgaattcgattgcaaagcatgggcgtatttttcagacgttgacttggagaaagatgtacattcaggacttattggtcctttgttggtgtgtcacactaacactctcaatccagcccatggcaggcaggtgacagtccaggaattcgctcttttctttaccatctttgatgagaccaagtcctggtacttcacggaaaacatggagcgcaattgcagagccccctgtaacatacagatggaggaccctacctttaaggaaaattatcggttccacgcaatcaacggatacattatggatacactccctggccttgtgatggctcaggaccaacgaatcaggtggtacctcctcagcatgggttctaatgagaacatacactccattcacttttcaggacatgtgttcactgtccggaagaaagaagagtataagatggccctctacaatttgtatccaggcgtgtttgagaccgttgaaatgcttccctctaaagctggcatctggagagtagagtgcttgatcggagaacatcttcacgcaggtatgagcaccttgttcctcgtgtacagcaacaaatgtcagaccccacttggcatggccagtggacacattcgcgactttcagatcacagcatctggccagtatggacaatgggccccaaagttggctcgcctccattactccggtagcataaatgcgtggtccactaaagaacctttcagctggattaaggtcgatcttcttgcccccatgatcatccacggcattaagacacagggagcgaggcagaaattctcctccctctacatctcacagttcattattatgtatagtttggacggcaagaagtggcaaacttatagaggtaacagtactggaacactcatggtgttcttcggcaacgttgatagctctggcatcaaacacaacatctttaatcctcccataatagctcggtacatcagattgcatccgacccactacagcattaggagtacactccgaatggagcttatgggttgcgacttgaattcctgttcaatgccactcggaatggagtctaaagccatctctgatgcacagataaccgccagtagctactttacgaacatgtttgctacgtggtcaccctctaaggcaaggcttcatttgcaaggccggtctaatgcctggagacctcaggtgaacaacccgaaagaatggctccaggtggactttcagaagaccatgaaagtaacaggtgtcactactcagggagttaagtccttgctcaccagcatgtatgtgaaggagttccttatttcctcatcacaagatggccaccagtggaccctcttctttcagaatggtaaggtcaaagtgtttcagggcaatcaagacagcttcacacccgtggtgaacagtcttgatcctccactcttgacacgataccttcgaatccatccacagtcttgggttcaccagattgcattgcgcatggaagtacttggatgcgaggctcaggacctctac

SEQ ID NO: 2768 - protein, 1457 aa, synthetic construct
  REGION 1..1457: note = Variant of human B-domain deleted Factor VIII
MQIELSTCFFLCLLRFCFSATRRYYLGAVELSWDYMQSDLGELPVDARFPPRVPKSFPFNTSVVYKKTLFVEFTDHLFNIAKPRPPWMGLLGPTIQAEVYDTVVITLKNMASHPVSLHAVGVSYWKASEGAEYDDQTSQREKEDDKVFPGGSHTYVWQVLKENGPMASDPLCLTYSYLSHVDLVKDLNSGLIGALLVCREGSLAKEKTQTLHKFILLFAVFDEGKSWHSETKNSLMQDRDAASARAWPKMHTVNGYVNRSLPGLIGCHRKSVYWHVIGMGTTPEVHSIFLEGHTFLVRNHRQASLEISPITFLTAQTLLMDLGQFLLFCHISSHQHDGMEAYVKVDSCPEEPQLRMKNNEEAEDYDDDLTDSEMDVVRFDDDNSPSFIQIRSVAKKHPKTWVHYIAAEEEDWDYAPLVLAPDDRSYKSQYLNNGPQRIGRKYKKVRFMAYTDETFKTREAIQHESGILGPLLYGEVGDTLLIIFKNQASRPYNIYPHGITDVRPLYSRRLPKGVKHLKDFPILPGEIFKYKWTVTVEDGPTKSDPRCLTRYYSSFVNMERDLASGLIGPLLICYKESVDQRGNQIMSDKRNVILFSVFDENRSWYLTENIQRFLPNPAGVQLEDPEFQASNIMHSINGYVFDSLQLSVCLHEVAYWYILSIGAQTDFLSVFFSGYTFKHKMVYEDTLTLFPFSGETVFMTMENPGLWILGCHNSDFRNRGMTALLKVSSCDKNTGDYYEDSYEDISAYLLSKNNAIEPRSFSQNPPVLKRHQREITRTTLQSDQEEIDYDDTISVEMKKEDFDIYDEDENQSPRSFQKKTRHYFIAAVERLWDYGMSSSPHVLRNRAQSGSVPQFKKVVFQEFTDGSFTQPLYRGELNEHLGLLGPYIRAEVEDNIMVTFRNQASRPYSFYSSLISYEEDQRQGAEPRKNFVKPNETKTYFWKVQHHMAPTKDEFDCKAWAYFSDVDLEKDVHSGLIGPLLVCHTNTLNPAHGRQVTVQEFALFFTIFDETKSWYFTENMERNCRAPCNIQMEDPTFKENYRFHAINGYIMDTLPGLVMAQDQRIRWYLLSMGSNENIHSIHFSGHVFTVRKKEEYKMALYNLYPGVFETVEMLPSKAGIWRVECLIGEHLHAGMSTLFLVYSNKCQTPLGMASGHIRDFQITASGQYGQWAPKLARLHYSGSINAWSTKEPFSWIKVDLLAPMIIHGIKTQGARQKFSSLYISQFIIMYSLDGKKWQTYRGNSTGTLMVFFGNVDSSGIKHNIFNPPIIARYIRLHPTHYSIRSTLRMELMGCDLNSCSMPLGMESKAISDAQITASSYFTNMFATWSPSKARLHLQGRSNAWRPQVNNPKEWLQVDFQKTMKVTGVTTQGVKSLLTSMYVKEFLISSSQDGHQWTLFFQNGKVKVFQGNQDSFTPVVNSLDPPLLTRYLRIHPQSWVHQIALRMEVLGCEAQDLY

SEQ ID NO: 2769 - DNA, 4371 bp, synthetic construct
  misc_feature 1..4371: note = Variant of human B-domain deleted Factor VIII
  source 1..4371: mol_type = other DNA
atgcagattgaactgtctacctgcttcttcctctgtttgctgaggttctgctttagcgccactagacggtactaccttggcgctgtggagctgtcctgggactatatgcagagtgatttgggagagcttcccgtcgacgcacgatttcctcctcgcgttccaaagtcatttcccttcaacacaagcgtggtgtacaagaagacgctcttcgtcgaattcaccgatcacctgttcaatatcgccaaacccagaccaccatggatgggtcttttggggcctaccatacaagcggaggtgtatgacacagttgttatcactctcaagaacatggcttctcatccggtaagtcttcacgcagtgggcgtgtcctactggaaagcttcagaaggagccgagtatgatgatcagacatcccagagggagaaagaagacgacaaggtatttccaggtgggtctcatacctatgtgtggcaagtgctcaaagagaatggccctatggcaagcgatccgctctgtttgacttacagctacctttcacacgttgacctcgtcaaggacctcaactccgggttgattggagccttgttggtatgcagggaaggatctcttgccaaagagaagacacagaccctccacaagtttatccttctctttgctgtgttcgatgagggcaaaagttggcatagcgaaacgaagaattccctcatgcaggatcgcgacgcagccagcgccagagcttggcccaagatgcacactgtgaacggatatgtcaataggtcacttcctggcttgattgggtgtcatcggaaaagtgtctactggcacgtgatcggaatggggacaacaccagaggtccactccatatttctcgaaggccataccttccttgttcgaaaccacagacaggcatccttggagatctctcccattacctttctcactgcccaaacgctccttatggacttgggtcagttccttctcttctgccatatcagctcacaccagcatgatggtatggaagcttatgtgaaagtcgacagttgtcctgaggagccacagttgcgcatgaagaataatgaagaagccgaggattacgacgacgatctcaccgattctgagatggacgtggtgaggtttgatgacgacaactctccctccttcattcaaatccggagcgtggcgaagaaacaccccaagacttgggtccactatatagcggcggaagaggaggattgggattacgctcctcttgtattggcaccagatgaccgctcatacaaaagccagtacctcaacaacggaccgcagagaattggccggaagtataagaaagtgcgatttatggcctatacagacgaaacctttaagacaagggaggccatccagcatgagagtgggattttgggacctcttctttacggcgaagttggtgataccctcctcatcatcttcaagaatcaagcttctcgcccctataacatttacccacacgggatcactgacgttaggcctttgtatagcagaagacttcccaaaggcgtgaagcatctcaaagacttccccattttgccaggcgagatctttaagtacaaatggaccgtcacagtggaagatggaccgactaaatcagaccctcgatgccttacgcggtactattcctccttcgtgaatatggagagagatttggcaagcggactcataggaccactcctcatctgttacaaggaatctgtagaccagaggggtaaccagattatgagtgataaacgcaatgtgatcctttttagcgtcttcgacgagaaccggtcctggtacttgaccgagaatatacaaaggttccttcccaaccccgcaggcgttcagttggaagaccctgagtttcaggccagcaatattatgcactcaatcaacggctatgtgtttgatagtctccagctttctgtttgcctccatgaagtagcctattggtacatcttgtcaattggtgctcaaacagacttcctctccgtcttcttctccggctacacctttaagcacaagatggtgtatgaggacactctcacactctttccattttctggagaaaccgtgttcatgagcatggagaatccaggcctttggatcttgggttgccacaacagtgattttcgcaatcggggaatgactgctctcctcaaagtcagcagctgtgataagaacacaggcgactattacgaagattcttacgaggacataagtgcctacttgttgtccgttaataacgccattgagcccagatcattctcccagaatcctcccgtgcttaaaaggcatcagcgcgaaatcaccagaactactcttcagtctgatcaagaggagattgactatgacgacaccataagcgtggaaatgaagaaggaggatttcgatatctatgacgaagatgagaaccagtctccgcggagctttcagaagaagacgcgacactacttcattgcagcagtcgaaaggctttgggactacggtatgtcatcatcccctcatgtgttgcgcaatagagctcagagtggaagtgttccacagttcaagaaagtcgtctttcaagagtttacagatggcagcttcacacagcctctctatcggggcgagcttaacgaacatttgggactccttggtccctatatccgagccgaagtggaggacaacattatggttacctttaggaatcaagcctctcgcccctacagcttctactcctccctcatcagttatgaggaggatcagagacaaggcgctgaaccacggaagaactttgtgaaaccgaatgagacgaagacctacttctggaaagtacagcaccacatggcccccacaaaagacgaattcgattgcaaagcatgggcgtatttttcagacgttgacttggagaaagatgtacattcaggacttattggtcctttgttggtgtgtcacactaacactctcaatccagcccatggcaggcaggtgacagtccaggaattcgctcttttctttaccatctttgatgagaccaagtcctggtacttcacggaaaacatggagcgcaattgcagagccccctgtaacatacagatggaggaccctacctttaaggaaaattatcggttccacgcaatcaacggatacattatggatacactccctggccttgtgatggctcaggaccaacgaatcaggtggtacctcctcagcatgggttctaatgagaacatacactccattcacttttcaggacatgtgttcactgtccggaagaaagaagagtataagatggccctctacaatttgtatccaggcgtgtttgagaccgttgaaatgcttccctctaaagctggcatctggagagtagagtgcttgatcggagaacatcttcacgcaggtatgagcaccttgttcctcgtgtacagcaacaaatgtcagaccccacttggcatggccagtggacacattcgcgactttcagatcacagcatctggccagtatggacaatgggccccaaagttggctcgcctccattactccggtagcataaatgcgtggtccactaaagaacctttcagctggattaaggtcgatcttcttgcccccatgatcatccacggcattaagacacagggagcgaggcagaaattctcctccctctacatctcacagttcattattatgtatagtttggacggcaagaagtggcaaacttatagaggtaacagtactggaacactcatggtgttcttcggcaacgttgatagctctggcatcaaacacaacatctttaatcctcccataatagctcggtacatcagattgcatccgacccactacagcattaggagtacactccgaatggagcttatgggttgcgacttgaattcctgttcaatgccactcggaatggagtctaaagccatctctgatgcacagataaccgccagtagctactttacgaacatgtttgctacgtggtcaccctctaaggcaaggcttcatttgcaaggccggtctaatgcctggagacctcaggtgaacaacccgaaagaatggctccaggtggactttcagaagaccatgaaagtaacaggtgtcactactcagggagttaagtccttgctcaccagcatgtatgtgaaggagttccttatttcctcatcacaagatggccaccagtggaccctcttctttcagaatggtaaggtcaaagtgtttcagggcaatcaagacagcttcacacccgtggtgaacagtcttgatcctccactcttgacacgataccttcgaatccatccacagtcttgggttcaccagattgcattgcgcatggaagtacttggatgcgaggctcaggacctctac

SEQ ID NO: 2770 - protein, 1457 aa, synthetic construct
  REGION 1..1457: note = Variant of human B-domain deleted Factor VIII
MQIELSTCFFLCLLRFCFSATRRYYLGAVELSWDYMQSDLGELPVDARFPPRVPKSFPFNTSVVYKKTLFVEFTDHLFNIAKPRPPWMGLLGPTIQAEVYDTVVITLKNMASHPVSLHAVGVSYWKASEGAEYDDQTSQREKEDDKVFPGGSHTYVWQVLKENGPMASDPLCLTYSYLSHVDLVKDLNSGLIGALLVCREGSLAKEKTQTLHKFILLFAVFDEGKSWHSETKNSLMQDRDAASARAWPKMHTVNGYVNRSLPGLIGCHRKSVYWHVIGMGTTPEVHSIFLEGHTFLVRNHRQASLEISPITFLTAQTLLMDLGQFLLFCHISSHQHDGMEAYVKVDSCPEEPQLRMKNNEEAEDYDDDLTDSEMDVVRFDDDNSPSFIQIRSVAKKHPKTWVHYIAAEEEDWDYAPLVLAPDDRSYKSQYLNNGPQRIGRKYKKVRFMAYTDETFKTREAIQHESGILGPLLYGEVGDTLLIIFKNQASRPYNIYPHGITDVRPLYSRRLPKGVKHLKDFPILPGEIFKYKWTVTVEDGPTKSDPRCLTRYYSSFVNMERDLASGLIGPLLICYKESVDQRGNQIMSDKRNVILFSVFDENRSWYLTENIQRFLPNPAGVQLEDPEFQASNIMHSINGYVFDSLQLSVCLHEVAYWYILSIGAQTDFLSVFFSGYTFKHKMVYEDTLTLFPFSGETVFMSMENPGLWILGCHNSDFRNRGMTALLKVSSCDKNTGDYYEDSYEDISAYLLSVNNAIEPRSFSQNPPVLKRHQREITRTTLQSDQEEIDYDDTISVEMKKEDFDIYDEDENQSPRSFQKKTRHYFIAAVERLWDYGMSSSPHVLRNRAQSGSVPQFKKVVFQEFTDGSFTQPLYRGELNEHLGLLGPYIRAEVEDNIMVTFRNQASRPYSFYSSLISYEEDQRQGAEPRKNFVKPNETKTYFWKVQHHMAPTKDEFDCKAWAYFSDVDLEKDVHSGLIGPLLVCHTNTLNPAHGRQVTVQEFALFFTIFDETKSWYFTENMERNCRAPCNIQMEDPTFKENYRFHAINGYIMDTLPGLVMAQDQRIRWYLLSMGSNENIHSIHFSGHVFTVRKKEEYKMALYNLYPGVFETVEMLPSKAGIWRVECLIGEHLHAGMSTLFLVYSNKCQTPLGMASGHIRDFQITASGQYGQWAPKLARLHYSGSINAWSTKEPFSWIKVDLLAPMIIHGIKTQGARQKFSSLYISQFIIMYSLDGKKWQTYRGNSTGTLMVFFGNVDSSGIKHNIFNPPIIARYIRLHPTHYSIRSTLRMELMGCDLNSCSMPLGMESKAISDAQITASSYFTNMFATWSPSKARLHLQGRSNAWRPQVNNPKEWLQVDFQKTMKVTGVTTQGVKSLLTSMYVKEFLISSSQDGHQWTLFFQNGKVKVFQGNQDSFTPVVNSLDPPLLTRYLRIHPQSWVHQIALRMEVLGCEAQDLY

SEQ ID NO: 2771 - DNA, 4371 bp, synthetic construct
  misc_feature 1..4371: note = Variant of human B-domain deleted Factor VIII
  source 1..4371: mol_type = other DNA
atgcagattgaactgtctacctgcttcttcctctgtttgctgaggttctgctttagcgccactagacggtactaccttggcgctgtggagctgtcctgggactatatgcagagtgatttgggagagcttcccgtcgacgcacgatttcctcctcgcgttccaaagtcatttcccttcaacacaagcgtggtgtacaagaagacgctcttcgtcgaattcaccgatcacctgttcaatatcgccaaacccagaccaccatggatgggtcttttggggcctaccatacaagcggaggtgtatgacacagttgttatcactctcaagaacatggcttctcatccggtaagtcttcacgcagtgggcgtgtcctactggaaagcttcagaaggagccgagtatgatgatcagacatcccagagggagaaagaagacgacaaggtatttccaggtgggtctcatacctatgtgtggcaagtgctcaaagagaatggccctatggcaagcgatccgctctgtttgacttacagctacctttcacacgttgacctcgtcaaggacctcaactccgggttgattggagccttgttggtatgcagggaaggatctcttgccaaagagaagacacagaccctccacaagtttatccttctctttgctgtgttcgatgagggcaaaagttggcatagcgaaacgaagaattccctcatgcaggatcgcgacgcagccagcgccagagcttggcccaagatgcacactgtgaacggatatgtcaataggtcacttcctggcttgattgggtgtcatcggaaaagtgtctactggcacgtgatcggaatggggacaacaccagaggtccactccatatttctcgaaggccataccttccttgttcgaaaccacagacaggcatccttggagatctctcccattacctttctcactgcccaaacgctccttatggacttgggtcagttccttctcttctgccatatctcgtcacaccagcatgatggtatggaagcttatgtgaaagtcgacagttgtcctgaggagccacagttgcgcatgaagaataatgaagaagccgaggattacgacgacgatctcaccgattctgagatggacgtggtgaggtttgatgacgacaactctccctccttcattcaaatccggagcgtggcgaagaaacaccccaagacttgggtccactatatagcggcggaagaggaggattgggattacgctcctcttgtattggcaccagatgaccgctcatacaaaagccagtacctcaacaacggaccgcagagaattggccggaagtataagaaagtgcgatttatggcctatacagacgaaacctttaagacaagggaggccatccagcatgagagtgggattttgggacctcttctttacggcgaagttggtgataccctcctcatcatcttcaagaatcaagcttctcgcccctataacatttacccacacgggatcactgacgttaggcctttgtatagcagaagacttcccaaaggcgtgaagcatctcaaagacttccccattttgccaggcgagatctttaagtacaaatggaccgtcacagtggaagatggaccgactaaatcagaccctcgatgccttacgcggtactattcctccttcgtgaatatggagagagatttggcaagcggactcataggaccactcctcatctgttacaaggaatctgtagaccagaggggtaaccagattatgagtgataaacgcaatgtgatcctttttagcgtcttcgacgagaaccggtcctggtacttgaccgagaatatacaaaggttccttcccaaccccgcaggcgttcagttggaagaccctgagtttcaggccagcaatattatgcactcaatcaacggctatgtgtttgatagtctccagctttctgtttgcctccatgaagtagcctattggtacatcttgtcaattggtgctcaaacagacttcctctccgtcttcttctccggctacacctttaagcacaagatggtgtatgaggacactctcacactctttccattttctggagaaaccgtgttcatgagcatggagaatccaggcctttggatcttgggttgccacaacagtgattttcgcaatcggggaatgactgctctcctcaaagtcagcagctgtgataagaacacaggcgactattacgaagattcttacgaggacataagtgcctacttgttgtccaagaataacgccattgagcccagatcattctcccagaatcctcccgtgcttaaaaggcatcagcgcgaaatcaccagaactactcttcagtctgatcaagaggagattgactatgacgacaccataagcgtggaaatgaagaaggaggatttcgatatctatgacgaagatgtgaaccagtctccgcggagctttcagaagaagacgcgacactacttcattgcagcagtcgaaaggctttgggactacggtatgtcatcatcccctcatgtgttgcgcaatagagctcagagtggaagtgttccacagttcaagaaagtcgtctttcaagagtttacagatggcagcttcacacagcctctctatcggggcgagcttaacgaacatttgggactccttggtccctatatccgagccgaagtggaggacaacattatggttacctttaggaatcaagcctctcgcccctacagcttctactcctccctcatcagttatgaggaggatcagagacaaggcgctgaaccacggaagaactttgtgaaaccgaatgagacgaagacctacttctggaaagtacagcaccacatggcccccacaaaagacgaattcgattgcaaagcatgggcgtatttttcagacgttgacttggagaaagatgtacattcaggacttattggtcctttgttggtgtgtcacactaacactctcaatccagcccatggcaggcaggtgacagtccaggaattcgctcttttctttaccatctttgatgagaccaagtcctggtacttcacggaaaacatggagcgcaattgcagagccccctgtaacatacagatggaggaccctacctttaaggaaaattatcggttccacgcaatcaacggatacattatggatacactccctggccttgtgatggctcaggaccaacgaatcaggtggtacctcctcagcatgggttctaatgagaacatacactccattcacttttcaggacatgtgttcactgtccggaagaaagaagagtataagatggccctctacaatttgtatccaggcgtgtttgagaccgttgaaatgcttccctctaaagctggcatctggagagtagagtgcttgatcggagaacatcttcacgcaggtatgagcaccttgttcctcgtgtacagcaacaaatgtcagaccccacttggcatggccagtggacacattcgcgactttcagatcacagcatctggccagtatggacaatgggccccaaagttggctcgcctccattactccggtagcataaatgcgtggtccactaaagaacctttcagctggattaaggtcgatcttcttgcccccatgatcatccacggcattaagacacagggagcgaggcagaaattctcctccctctacatctcacagttcattattatgtatagtttggacggcaagaagtggcaaacttatagaggtaacagtactggaacactcatggtgttcttcggcaacgttgatagctctggcatcaaacacaacatctttaatcctcccataatagctcggtacatcagattgcatccgacccactacagcattaggagtacactccgaatggagcttatgggttgcgacttgaattcctgttcaatgccactcggaatggagtctaaagccatctctgatgcacagataaccgccagtagctactttacgaacatgtttgctacgtggtcaccctctaaggcaaggcttcatttgcaaggccggtctaatgcctggagacctcaggtgaacaacccgaaagaatggctccaggtggactttcagaagaccatgaaagtaacaggtgtcactactcagggagttaagtccttgctcaccagcatgtatgtgaaggagttccttatttcctcatcacaagatggccaccagtggaccctcttctttcagaatggtaaggtcaaagtgtttcagggcaatcaagacagcttcacacccgtggtgaacagtcttgatcctccactcttgacacgataccttcgaatccatccacagtcttgggttcaccagattgcattgcgcatggaagtacttggatgcgaggctcaggacctctac

SEQ ID NO: 2772 - protein, 1457 aa, synthetic construct
  REGION 1..1457: note = Variant of human B-domain deleted Factor VIII
MQIELSTCFFLCLLRFCFSATRRYYLGAVELSWDYMQSDLGELPVDARFPPRVPKSFPFNTSVVYKKTLFVEFTDHLFNIAKPRPPWMGLLGPTIQAEVYDTVVITLKNMASHPVSLHAVGVSYWKASEGAEYDDQTSQREKEDDKVFPGGSHTYVWQVLKENGPMASDPLCLTYSYLSHVDLVKDLNSGLIGALLVCREGSLAKEKTQTLHKFILLFAVFDEGKSWHSETKNSLMQDRDAASARAWPKMHTVNGYVNRSLPGLIGCHRKSVYWHVIGMGTTPEVHSIFLEGHTFLVRNHRQASLEISPITFLTAQTLLMDLGQFLLFCHISSHQHDGMEAYVKVDSCPEEPQLRMKNNEEAEDYDDDLTDSEMDVVRFDDDNSPSFIQIRSVAKKHPKTWVHYIAAEEEDWDYAPLVLAPDDRSYKSQYLNNGPQRIGRKYKKVRFMAYTDETFKTREAIQHESGILGPLLYGEVGDTLLIIFKNQASRPYNIYPHGITDVRPLYSRRLPKGVKHLKDFPILPGEIFKYKWTVTVEDGPTKSDPRCLTRYYSSFVNMERDLASGLIGPLLICYKESVDQRGNQIMSDKRNVILFSVFDENRSWYLTENIQRFLPNPAGVQLEDPEFQASNIMHSINGYVFDSLQLSVCLHEVAYWYILSIGAQTDFLSVFFSGYTFKHKMVYEDTLTLFPFSGETVFMSMENPGLWILGCHNSDFRNRGMTALLKVSSCDKNTGDYYEDSYEDISAYLLSKNNAIEPRSFSQNPPVLKRHQREITRTTLQSDQEEIDYDDTISVEMKKEDFDIYDEDVNQSPRSFQKKTRHYFIAAVERLWDYGMSSSPHVLRNRAQSGSVPQFKKVVFQEFTDGSFTQPLYRGELNEHLGLLGPYIRAEVEDNIMVTFRNQASRPYSFYSSLISYEEDQRQGAEPRKNFVKPNETKTYFWKVQHHMAPTKDEFDCKAWAYFSDVDLEKDVHSGLIGPLLVCHTNTLNPAHGRQVTVQEFALFFTIFDETKSWYFTENMERNCRAPCNIQMEDPTFKENYRFHAINGYIMDTLPGLVMAQDQRIRWYLLSMGSNENIHSIHFSGHVFTVRKKEEYKMALYNLYPGVFETVEMLPSKAGIWRVECLIGEHLHAGMSTLFLVYSNKCQTPLGMASGHIRDFQITASGQYGQWAPKLARLHYSGSINAWSTKEPFSWIKVDLLAPMIIHGIKTQGARQKFSSLYISQFIIMYSLDGKKWQTYRGNSTGTLMVFFGNVDSSGIKHNIFNPPIIARYIRLHPTHYSIRSTLRMELMGCDLNSCSMPLGMESKAISDAQITASSYFTNMFATWSPSKARLHLQGRSNAWRPQVNNPKEWLQVDFQKTMKVTGVTTQGVKSLLTSMYVKEFLISSSQDGHQWTLFFQNGKVKVFQGNQDSFTPVVNSLDPPLLTRYLRIHPQSWVHQIALRMEVLGCEAQDLY

SEQ ID NO: 2773 - DNA, 4371 bp, synthetic construct
  misc_feature 1..4371: note = Variant of human B-domain deleted Factor VIII
  source 1..4371: mol_type = other DNA
atgcagattgaactgtctacctgcttcttcctctgtttgctgaggttctgctttagcgccactagacggtactaccttggcgctgtggagctgtcctgggactatatgcagagtgatttgggagagcttcccgtcgacgcacgatttcctcctcgcgttccaaagtcatttcccttcaacacaagcgtggtgtacaagaagacgctcttcgtcgaattcaccgatcacctgttcaatatcgccaaacccagaccaccatggatgggtcttttggggcctaccatacaagcggaggtgtatgacacagttgttatcactctcaagaacatggcttctcatccggtaagtcttcacgcagtgggcgtgtcctactggaaagcttcagaaggagccgagtatgatgatcagacatcccagagggagaaagaagacgacaaggtatttccaggtgggtctcatacctatgtgtggcaagtgctcaaagagaatggccctatggcaagcgatccgctctgtttgacttacagctacctttcacacgttgacctcgtcaaggacctcaactccgggttgattggagccttgttggtatgcagggaaggatctcttgccaaagagaagacacagaccctccacaagtttatccttctctttgctgtgttcgatgagggcaaaagttggcatagcgaaacgaagaattccctcatgcaggatcgcgacgcagccagcgccagagcttggcccaagatgcacactgtgaacggatatgtcaataggtcacttcctggcttgattgggtgtcatcggaaaagtgtctactggcacgtgatcggaatggggacaacaccagaggtccactccatatttctcgaaggccataccttccttgttcgaaaccacagacaggcatccttggagatctctcccattacctttctcactgcccaaacgctccttatggacttgggtcagttccttctcttctgccatatcagctcacaccagcatgatggtatggaagcttatgtgaaagtcgacagttgtcctgaggagccacagttgcgcatgaagaataatgaagaagccgaggattacgacgacgatctcaccgattctgagatggacgtggtgaggtttgatgacgacaactctccctccttcattcaaatccggagcgtggcgaagaaacaccccaagacttgggtccactatatagcggcggaagaggaggattgggattacgctcctcttgtattggcaccagatgaccgctcatacaaaagccagtacctcaacaacggaccgcagagaattggccggaagtataagaaagtgcgatttatggcctatacagacgaaacctttaagacaagggaggccatccagcatgagagtgggattttgggacctcttctttacggcgaagttggtgataccctcctcatcatcttcaagaatcaagcttctcgcccctataacatttacccacacgggatcactgacgttaggcctttgtatagcagaagacttcccaaaggcgtgaagcatctcaaagacttccccattttgccaggcgagatctttaagtacaaatggaccgtcacagtggaagatggaccgactaaatcagaccctcgatgccttacgcggtactattcctccttcgtgaatatggagagagatttggcaagcggactcataggaccactcctcatctgttacaaggaatctgtagaccagaggggtaaccagattatgagtgataaacgcaatgtgatcctttttagcgtcttcgacgagaaccggtcctggtacttgaccgagaatatacaaaggttccttcccaaccccgcaggcgttcagttggaagaccctgagtttcaggccagcaatattatgcactcaatcaacggctatgtgtttgatagtctccagctttctgtttgcctccatgaagtagcctattggtacatcttgtcaattggtgctcaaacagacttcctctccgtcttcttctccggctacacctttaagcacaagatggtgtatgaggacactctcacactctttccattttctggagaaaccgtgttcatgagcatggagaatccaggcctttggatcttgggttgccacaacagtgattttcgcaatcggggaatgactgctctcctcaaagtcagcagctgtgataagaacacaggcgactattacgaagattcttacgaggacataagtgcctacttgttgtccaagaataacgccattgagcccagatcattctcccagaatcctcccgtgcttaaaaggcatcagcgcgaaatcaccagaactactcttcagtctgatcaagaggagattgactatgacgacaccataagcgtggaaatgaagaaggaggatttcgatatctatgacgaagatgagaaccagtctccgcggagctttcagaagaagacgcgacactacttcattgcagcagtcgaaaggctttgggactacggtatgtcatcatcccctcatgtgttgcgcaatagagctcagagtggaagtgttccacagttcaagaaagtcgtctttcaagagtttacagatggcagcttcacacagcctctctatcggggcgagcttaacgaacatttgggactccttggtccctatatccgagccgaagtggaggacaacattatggttacctttaggaatcaagcctctcgcccctacagcttctactcctccctcatcagttatgaggaggatcagagacaaggcgctgaaccacggaagaactttgtgaaaccgaatgagacgaagacctacttctggaaagtacagcaccacatggcccccacaaaagacgaattcgattgcaaagcatgggcgtatttttcagacgttgacttggagaaagatgtacattcaggacttattggtcctttgttggtgtgtcacactaacactctcaatccagcccatggcaggcaggtgacagtccaggaattcgctcttttctttaccatctttgatgagaccaagtcctggtacttcacggaaaacatggagcgcaattgcagagccccctgtaacatacagatggaggaccctacctttaaggaaaattatcggttccacgcaatcaacggatacattatggatacactccctggccttgtgatggctcaggaccaacgaatcaggtggtacctcctcagcatgggttctaatgagaacatacactccattcacttttcaggacatgtgttcactgtccggaaggcggaagagtataagatggccctctacaatttgtatccaggcgtgtttgagaccgttgaaatgcttccctctaaagctggcatctggagagtagagtgcttgatcggagaacatcttcacgcaggtatgagcaccttgttcctcgtgtacagcaacaaatgtcagaccccacttggcatggccagtggacacattcgcgactttcagatcacagcatctggccagtatggacaatgggccccaaagttggctcgcctccattactccggtagcataaatgcgtggtccactaaagaacctttcagctggattaaggtcgatcttcttgcccccatgatcatccacggcattaagacacagggagcgaggcagaaattctcctccctctacatctcacagttcattattatgtatagtttggacggcaagaagtggcaaacttatagaggtaacagtactggaacactcatggtgttcttcggcaacgttgatagctctggcatcaaacacaacatctttaatcctcccataatagctcggtacatcagattgcatccgacccactacagcattaggagtacactccgaatggagcttatgggttgcgacttgaattcctgttcaatgccactcggaatggagtctaaagccatctctgatgcacagataaccgccagtagctactttacgaacatgtttgctacgtggtcaccctctaaggcaaggcttcatttgcaaggccggtctaatgcctggagacctcaggtgaacaacccgaaagaatggctccaggtggactttcagaagaccatgaaagtaacaggtgtcactactcagggagttaagtccttgctcaccagcatgtatgtgaaggagttccttatttcctcatcacaagatggccaccagtggaccctcttctttcagaatggtaaggtcaaagtgtttcagggcaatcaagacagcttcacacccgtggtgaacagtcttgatcctccactcttgacacgataccttcgaatccatccacagtcttgggttcaccagattgcattgcgcatggaagtacttggatgcgaggctcaggacctctac

SEQ ID NO: 2774 - protein, 1457 aa, synthetic construct
  REGION 1..1457: note = Variant of human B-domain deleted Factor VIII
MQIELSTCFFLCLLRFCFSATRRYYLGAVELSWDYMQSDLGELPVDARFPPRVPKSFPFNTSVVYKKTLFVEFTDHLFNIAKPRPPWMGLLGPTIQAEVYDTVVITLKNMASHPVSLHAVGVSYWKASEGAEYDDQTSQREKEDDKVFPGGSHTYVWQVLKENGPMASDPLCLTYSYLSHVDLVKDLNSGLIGALLVCREGSLAKEKTQTLHKFILLFAVFDEGKSWHSETKNSLMQDRDAASARAWPKMHTVNGYVNRSLPGLIGCHRKSVYWHVIGMGTTPEVHSIFLEGHTFLVRNHRQASLEISPITFLTAQTLLMDLGQFLLFCHISSHQHDGMEAYVKVDSCPEEPQLRMKNNEEAEDYDDDLTDSEMDVVRFDDDNSPSFIQIRSVAKKHPKTWVHYIAAEEEDWDYAPLVLAPDDRSYKSQYLNNGPQRIGRKYKKVRFMAYTDETFKTREAIQHESGILGPLLYGEVGDTLLIIFKNQASRPYNIYPHGITDVRPLYSRRLPKGVKHLKDFPILPGEIFKYKWTVTVEDGPTKSDPRCLTRYYSSFVNMERDLASGLIGPLLICYKESVDQRGNQIMSDKRNVILFSVFDENRSWYLTENIQRFLPNPAGVQLEDPEFQASNIMHSINGYVFDSLQLSVCLHEVAYWYILSIGAQTDFLSVFFSGYTFKHKMVYEDTLTLFPFSGETVFMSMENPGLWILGCHNSDFRNRGMTALLKVSSCDKNTGDYYEDSYEDISAYLLSKNNAIEPRSFSQNPPVLKRHQREITRTTLQSDQEEIDYDDTISVEMKKEDFDIYDEDENQSPRSFQKKTRHYFIAAVERLWDYGMSSSPHVLRNRAQSGSVPQFKKVVFQEFTDGSFTQPLYRGELNEHLGLLGPYIRAEVEDNIMVTFRNQASRPYSFYSSLISYEEDQRQGAEPRKNFVKPNETKTYFWKVQHHMAPTKDEFDCKAWAYFSDVDLEKDVHSGLIGPLLVCHTNTLNPAHGRQVTVQEFALFFTIFDETKSWYFTENMERNCRAPCNIQMEDPTFKENYRFHAINGYIMDTLPGLVMAQDQRIRWYLLSMGSNENIHSIHFSGHVFTVRKAEEYKMALYNLYPGVFETVEMLPSKAGIWRVECLIGEHLHAGMSTLFLVYSNKCQTPLGMASGHIRDFQITASGQYGQWAPKLARLHYSGSINAWSTKEPFSWIKVDLLAPMIIHGIKTQGARQKFSSLYISQFIIMYSLDGKKWQTYRGNSTGTLMVFFGNVDSSGIKHNIFNPPIIARYIRLHPTHYSIRSTLRMELMGCDLNSCSMPLGMESKAISDAQITASSYFTNMFATWSPSKARLHLQGRSNAWRPQVNNPKEWLQVDFQKTMKVTGVTTQGVKSLLTSMYVKEFLISSSQDGHQWTLFFQNGKVKVFQGNQDSFTPVVNSLDPPLLTRYLRIHPQSWVHQIALRMEVLGCEAQDLY

SEQ ID NO: 2775 - DNA, 4371 bp, synthetic construct
  misc_feature 1..4371: note = Variant of human B-domain deleted Factor VIII
  source 1..4371: mol_type = other DNA
atgcagattgaactgtctacctgcttcttcctctgtttgctgaggttctgctttagcgccactagacggtactaccttggcgctgtggagctgtcctgggactatatgcagagtgatttgggagagcttcccgtcgacgcacgatttcctcctcgcgttccaaagtcatttcccttcaacacaagcgtggtgtacaagaagacgctcttcgtcgaattcaccgatcacctgttcaatatcgccaaacccagaccaccatggatgggtcttttggggcctaccatacaagcggaggtgtatgacacagttgttatcactctcaagaacatggcttctcatccggtaagtcttcacgcagtgggcgtgtcctactggaaagcttcagaaggagccgagtatgatgatcagacatcccagagggagaaagaagacgacaaggtatttccaggtgggtctcatacctatgtgtggcaagtgctcaaagagaatggccctatggcaagcgatccgctctgtttgacttacagctacctttcacacgttgacctcgtcaaggacctcaactccgggttgattggagccttgttggtatgcagggaaggatctcttgccaaagagaagacacagaccctccacaagtttatccttctctttgctgtgttcgatgagggcaaaagttggcatagcgaaacgaagaattccctcatgcaggatcgcgacgcagccagcgccagagcttggcccaagatgcacactgtgaacggatatgtcaataggtcacttcctggcttgattgggtgtcatcggaaaagtgtctactggcacgtgatcggaatggggacaacaccagaggtccactccatatttctcgaaggccataccttccttgttcgaaaccacagacaggcatccttggagatctctcccattacctttctcactgcccaaacgctccttggtgacttgggtcagttccttctcttctgccatatcagctcacaccagcatgatggtatggaagcttatgtgaaagtcgacagttgtcctgaggagccacagttgcgcatgaagaataatgaagaagccgaggattacgacgacgatctcaccgattctgagatggacgtggtgaggtttgatgacgacaactctccctccttcattcaaatccggagcgtggcgaagaaacaccccaagacttgggtccactatatagcggcggaagaggaggattgggattacgctcctcttgtattggcaccagatgaccgctcatacaaaagccagtacctcaacaacggaccgcagagaattggccggaagtataagaaagtgcgatttatggcctatacagacgaaacctttaagacaagggaggccatccagcatgagagtgggattttgggacctcttctttacggcgaagttggtgataccctcctcatcatcttcaagaatcaagcttctcgcccctataacatttacccacacgggatcactgacgttaggcctttgtatagcagaagacttcccaaaggcgtgaagcatctcaaagacttccccattttgccaggcgagatctttaagtacaaatggaccgtcacagtggaagatggaccgactaaatcagaccctcgatgccttacgcggtactattcctccttcgtgaatatggagagagatttggcaagcggactcataggaccactcctcatctgttacaaggaatctgtagaccagaggggtaaccagattatgagtgataaacgcaatgtgatcctttttagcgtcttcgacgagaaccggtcctggtacttgaccgagaatatacaaaggttccttcccaaccccgcaggcgttcagttggaagaccctgagtttcaggccagcaatattatgcactcaatcaacggctatgtgtttgatagtctccagctttctgtttgcctccatgaagtagcctattggtacatcttgtcaattggtgctcaaacagacttcctctccgtcttcttctccggctacacctttaagcacaagatggtgtatgaggacactctcacactctttccattttctggagaaaccgtgttcatgagcatggagaatccaggcctttggatcttgggttgccacaacagtgattttcgcaatcggggaatgactgctctcctcaaagtcagcagctgtgataagaacacaggcgactattacgaagattcttacgaggacataagtgcctacttgttgtccaagaataacgccattgagcccagatcattctcccagaatcctcccgtgcttaaaaggcatcagcgcgaaatcaccagaactactcttcagtctgatcaagaggagattgactatgacgacaccataagcgtggaaatgaagaaggaggatttcgatatctatgacgaagatgagaaccagtctccgcggagctttcagaagaagacgcgacactacttcattgcagcagtcgaaaggctttgggactacggtatgtcatcatcccctcatgtgttgcgcaatagagctcagagtggaagtgttccacagttcaagaaagtcgtctttcaagagtttacagatggcagcttcacacagcctctctatcggggcgagcttaacgaacatttgggactccttggtccctatatccgagccgaagtggaggacaacattatggttacctttaggaatcaagcctctcgcccctacagcttctactcctccctcatcagttatgaggaggatcagagacaaggcgctgaaccacggaagaactttgtgaaaccgaatgagacgaagacctacttctggaaagtacagcaccacatggcccccacaaaagacgaattcgattgcaaagcatgggcgtatttttcagacgttgacttggagaaagatgtacattcaggacttattggtcctttgttggtgtgtcacactaacactctcaatccagcccatggcaggcaggtgacagtccaggaattcgctcttttctttaccatctttgatgagaccaagtcctggtacttcacggaaaacatggagcgcaattgcagagccccctgtaacatacagatggaggaccctacctttaaggaaaattatcggttccacgcaatcaacggatacattatggatacactccctggccttgtgatggctcaggaccaacgaatcaggtggtacctcctcagcatgggttctaatgagaacatacactccattcacttttcaggacatgtgttcactgtccggaagaaagaagagtataagatggccctctacaatttgtatccgggcgtgtttgagaccgttgaaatgcttccctctaaagctggcatctggagagtagagtgcttgatcggagaacatcttcacgcaggtatgagcaccttgttcctcgtgtacagcaacaaatgtcagaccccacttggcatggccagtggacacattcgcgactttcagatcacagcatctggccagtatggacaatgggccccaaagttggctcgcctccattactccggtagcataaatgcgtggtccactaaagaacctttcagctggattaaggtcgatcttcttgcccccatgatcatccacggcattaagacacagggagcgaggcagaaattctcctccctctacatctcacagttcattattatgtatagtttggacggcaagaagtggcaaacttatagaggtaacagtactggaacactcatggtgttcttcggcaacgttgatagctctggcatcaaacacaacatctttaatcctcccataatagctcggtacatcagattgcatccgacccactacagcattaggagtacactccgaatggagcttatgggttgcgacttgaattcctgttcaatgccactcggaatggagtctaaagccatctctgatgcacagataaccgccagtagctactttacgaacatgtttgctacgtggtcaccctctaaggcaaggcttcatttgcaaggccggtctaatgcctggagacctcaggtgaacaacccgaaagaatggctccaggtggactttcagaagaccatgaaagtaacaggtgtcactactcagggagttaagtccttgctcaccagcatgtatgtgaaggagttccttatttcctcatcacaagatggccaccagtggaccctcttctttcagaatggtaaggtcaaagtgtttcagggcaatcaagacagcttcacacccgtggtgaacagtcttgatcctccactcttgacacgataccttcgaatccatccacagtcttgggttcaccagattgcattgcgcatggaagtacttggatgcgaggctcaggacctctac

SEQ ID NO: 2776 - protein, 1457 aa, synthetic construct
  REGION 1..1457: note = Variant of human B-domain deleted Factor VIII
MQIELSTCFFLCLLRFCFSATRRYYLGAVELSWDYMQSDLGELPVDARFPPRVPKSFPFNTSVVYKKTLFVEFTDHLFNIAKPRPPWMGLLGPTIQAEVYDTVVITLKNMASHPVSLHAVGVSYWKASEGAEYDDQTSQREKEDDKVFPGGSHTYVWQVLKENGPMASDPLCLTYSYLSHVDLVKDLNSGLIGALLVCREGSLAKEKTQTLHKFILLFAVFDEGKSWHSETKNSLMQDRDAASARAWPKMHTVNGYVNRSLPGLIGCHRKSVYWHVIGMGTTPEVHSIFLEGHTFLVRNHRQASLEISPITFLTAQTLLGDLGQFLLFCHISSHQHDGMEAYVKVDSCPEEPQLRMKNNEEAEDYDDDLTDSEMDVVRFDDDNSPSFIQIRSVAKKHPKTWVHYIAAEEEDWDYAPLVLAPDDRSYKSQYLNNGPQRIGRKYKKVRFMAYTDETFKTREAIQHESGILGPLLYGEVGDTLLIIFKNQASRPYNIYPHGITDVRPLYSRRLPKGVKHLKDFPILPGEIFKYKWTVTVEDGPTKSDPRCLTRYYSSFVNMERDLASGLIGPLLICYKESVDQRGNQIMSDKRNVILFSVFDENRSWYLTENIQRFLPNPAGVQLEDPEFQASNIMHSINGYVFDSLQLSVCLHEVAYWYILSIGAQTDFLSVFFSGYTFKHKMVYEDTLTLFPFSGETVFMSMENPGLWILGCHNSDFRNRGMTALLKVSSCDKNTGDYYEDSYEDISAYLLSKNNAIEPRSFSQNPPVLKRHQREITRTTLQSDQEEIDYDDTISVEMKKEDFDIYDEDENQSPRSFQKKTRHYFIAAVERLWDYGMSSSPHVLRNRAQSGSVPQFKKVVFQEFTDGSFTQPLYRGELNEHLGLLGPYIRAEVEDNIMVTFRNQASRPYSFYSSLISYEEDQRQGAEPRKNFVKPNETKTYFWKVQHHMAPTKDEFDCKAWAYFSDVDLEKDVHSGLIGPLLVCHTNTLNPAHGRQVTVQEFALFFTIFDETKSWYFTENMERNCRAPCNIQMEDPTFKENYRFHAINGYIMDTLPGLVMAQDQRIRWYLLSMGSNENIHSIHFSGHVFTVRKKEEYKMALYNLYPGVFETVEMLPSKAGIWRVECLIGEHLHAGMSTLFLVYSNKCQTPLGMASGHIRDFQITASGQYGQWAPKLARLHYSGSINAWSTKEPFSWIKVDLLAPMIIHGIKTQGARQKFSSLYISQFIIMYSLDGKKWQTYRGNSTGTLMVFFGNVDSSGIKHNIFNPPIIARYIRLHPTHYSIRSTLRMELMGCDLNSCSMPLGMESKAISDAQITASSYFTNMFATWSPSKARLHLQGRSNAWRPQVNNPKEWLQVDFQKTMKVTGVTTQGVKSLLTSMYVKEFLISSSQDGHQWTLFFQNGKVKVFQGNQDSFTPVVNSLDPPLLTRYLRIHPQSWVHQIALRMEVLGCEAQDLY

SEQ ID NO: 2777 - DNA, 4371 bp, synthetic construct
  misc_feature 1..4371: note = Variant of human B-domain deleted Factor VIII
  source 1..4371: mol_type = other DNA
atgcagattgaactgtctacctgcttcttcctctgtttgctgaggttctgctttagcgccactagacggtactaccttggcgctgtggagctgtcctgggactatatgcagagtgatttgggagagcttcccgtcgacgcacgatttcctcctcgcgttccaaagtcatttcccttcaacacaagcgtggtgtacaagaagacgctcttcgtcgaattcaccgatcacctgttcaatatcgccaaacccagaccaccatggatgggtcttttggggcctaccatacaagcggaggtgtatgacacagttgttatcactctcaagaacatggcttctcatccggtaagtcttcacgcagtgggcgtgtcctactggaaagcttcagaaggagccgagtatgatgatcagacatcccagagggagaaagaagacgacaaggtatttccaggtgggtctcatacctatgtgtggcaagtgctcaaagagaatggccctatggcaagcgatccgctctgtttgacttacagctacctttcacacgttgacctcgtcaaggacctcaactccgggttgattggagccttgttggtatgcagggaaggatctcttgccaaagagaagacacagaccctccacaagtttatccttctctttgctgtgttcgatgagggcaaaagttggcatagcgaaacgaagaattccctcatgcaggatcgcgacgcagccagcgccagagcttggcccaagatgcacactgtgaacggatatgtcaataggtcacttcctggcttgattgggtgtcatcggaaaagtgtctactggcacgtgatcggaatggggacaacaccagaggtccactccatatttctcgaaggccataccttccttgttcgaaaccacagacaggcatccttggagatctctcccattacctttctcactgcccaaacgctccttatggacttgggtcagttccttctcttctgccatatcagctcacaccagcatgatggtatggaagcttatgtgaaagtcgacagttgtcctgaggagccacagttgcgcatgaagaataatgaagaagccgaggattacgacgacgatctcaccgattctgagatggacgtggtgaggtttgatgacgacaactctccctccttcattcaaatgcggagcgtggcgaagaaacaccccaagacttgggtccactatatagcggcggaagaggaggattgggattacgctcctcttgtattggcaccagatgaccgctcatacaaaagccagtacctcaacaacggaccgcagagaattggccggaagtataagaaagtgcgatttatggcctatacagacgaaacctttaagacaagggaggccatccagcatgagagtgggattttgggacctcttctttacggcgaagttggtgataccctcctcatcatcttcaagaatcaagcttctcgcccctataacatttacccacacgggatcactgacgttaggcctttgtatagcagaagacttcccaaaggcgtgaagcatctcaaagacttccccattttgccaggcgagatctttaagtacaaatggaccgtcacagtggaagatggaccgactaaatcagaccctcgatgccttacgcggtactattcctccttcgtgaatatggagagagatttggcaagcggactcataggaccactcctcatctgttacaaggaatctgtagaccagaggggtaaccagattatgagtgataaacgcaatgtgatcctttttagcgtcttcgacgagaaccggtcctggtacttgaccgagaatatacaaaggttccttcccaaccccgcaggcgttcagttggaagaccctgagtttcaggccagcaatattatgcactcaatcaacggctatgtgtttgatagtctccagctttctgtttgcctccatgaagtagcctattggtacatcttgtcaattggtgctcaaacagacttcctctccgtcttcttctccggctacacctttaagcacaagatggtgtatgaggacactctcacactctttccattttctggagaaaccgtgttcatgagcatggagaatccaggcctttggatcttgggttgccacaacagtgattttcgcaatcggggaatgactgctctcctcaaagtcagcagctgtgataagaacacaggcgactattacgaagattcttacgaggacataagtgcctacttgttgtccaagaataacgccattgagcccagatcattctcccagaatcctcccgtgcttaaaaggcatcagcgcgaaatcaccagaactactcttcagtctgatcaagaggagattgactatgacgacaccataagcgtggaaatgaagaaggaggatttcgatatctatgacgaagatgagaaccagtctccgcggagctttcagaagaagacgcgacactacttcattgcagcagtcgaaaggctttgggactacggtatgtcatcatcccctcatgtgttgcgcaatagagctcagagtggaagtgttccacagttcaagaaagtcgtctttcaagagtttacagatggcagcttcacacagcctctctatcggggcgagcttaacgaacatttgggactccttggtccctatatccgagccgaagtggaggacaacattatggttacctttaggaatcaagcctctcgcccctacagcttctactcctccctcatcagttatgaggaggatcagagacaaggcgctgaaccacggaagaactttgtgaaaccgaatgagacgaagacctacttctggaaagtacagcaccacatggcccccacaaaagacgaattcgattgcaaagcatgggcgtatttttcagacgttgacttggagaaagatgtacattcaggacttattggtcctttgttggtgtgtcacactaacactctcaatccagcccatggcaggcaggtgacagtccaggaattcgctcttttctttaccatctttgatgagaccaagtcctggtacttcacggaaaacatggagcgcaattgcagagccccctgtaacatacagatggaggaccctacctttaaggaaaattatcggttccacgcaatcaacggatacattatggatacactccctggccttgtgatggctcaggaccaacgaatcaggtggtacctcctcagcatgggttctaatgagaacatacactccattcacttttcaggacatgtgttcactgtccggaagaaagaagagtataagatggccctctacaatttgtatccaggcgtgtttgagaccgttgaaatgcttccctctaaagctggcatctggagagtagagtgcttgatcggagaacatcttcacgcaggtatgagcaccttgttcctcgtgtacagcaacaaatgtcagaccccacttggcatggccagtggacacattcgcgactttcagatcacagcatctggccagtatggacaatgggccccaaagttggctcgcctccattactccggtagcataaatgcgtggtccactaaagaacctttcagctggattaaggtcgatcttcttgcccccatgatcatccacggcattaagacacagggagcgaggcagaaattctcctccctctacatctcacagttcattattatgtatagtttggacggcaagaagtggcaaacttatagaggtaacagtactggaacactcatggtgttcttcggcaacgttgatagctctggcatcaaacacaacatctttaatcctcccataatagctcggtacatcagattgcatccgacccactacagcattaggagtacactccgaatggagcttatgggttgcgacttgaattcctgttcaatgccactcggaatggagtctaaagccatctctgatgcacagataaccgccagtagctactttacgaacatgtttgctacgtggtcaccctctaaggcaaggcttcatttgcaaggccggtctaatgcctggagacctcaggtgaacaacccgaaagaatggctccaggtggactttcagaagaccatgaaagtaacaggtgtcactactcagggagttaagtccttgctcaccagcatgtatgtgaaggagttccttatttcctcatcacaagatggccaccagtggaccctcttctttcagaatggtaaggtcaaagtgtttcagggcaatcaagacagcttcacacccgtggtgaacagtcttgatcctccactcttgacacgataccttcgaatccatccacagtcttgggttcaccagattgcattgcgcatggaagtacttggatgcgaggctcaggacctctac

SEQ ID NO: 2778 - protein, 1457 aa, synthetic construct
  REGION 1..1457: note = Variant of human B-domain deleted Factor VIII
MQIELSTCFFLCLLRFCFSATRRYYLGAVELSWDYMQSDLGELPVDARFPPRVPKSFPFNTSVVYKKTLFVEFTDHLFNIAKPRPPWMGLLGPTIQAEVYDTVVITLKNMASHPVSLHAVGVSYWKASEGAEYDDQTSQREKEDDKVFPGGSHTYVWQVLKENGPMASDPLCLTYSYLSHVDLVKDLNSGLIGALLVCREGSLAKEKTQTLHKFILLFAVFDEGKSWHSETKNSLMQDRDAASARAWPKMHTVNGYVNRSLPGLIGCHRKSVYWHVIGMGTTPEVHSIFLEGHTFLVRNHRQASLEISPITFLTAQTLLMDLGQFLLFCHISSHQHDGMEAYVKVDSCPEEPQLRMKNNEEAEDYDDDLTDSEMDVVRFDDDNSPSFIQMRSVAKKHPKTWVHYIAAEEEDWDYAPLVLAPDDRSYKSQYLNNGPQRIGRKYKKVRFMAYTDETFKTREAIQHESGILGPLLYGEVGDTLLIIFKNQASRPYNIYPHGITDVRPLYSRRLPKGVKHLKDFPILPGEIFKYKWTVTVEDGPTKSDPRCLTRYYSSFVNMERDLASGLIGPLLICYKESVDQRGNQIMSDKRNVILFSVFDENRSWYLTENIQRFLPNPAGVQLEDPEFQASNIMHSINGYVFDSLQLSVCLHEVAYWYILSIGAQTDFLSVFFSGYTFKHKMVYEDTLTLFPFSGETVFMSMENPGLWILGCHNSDFRNRGMTALLKVSSCDKNTGDYYEDSYEDISAYLLSKNNAIEPRSFSQNPPVLKRHQREITRTTLQSDQEEIDYDDTISVEMKKEDFDIYDEDENQSPRSFQKKTRHYFIAAVERLWDYGMSSSPHVLRNRAQSGSVPQFKKVVFQEFTDGSFTQPLYRGELNEHLGLLGPYIRAEVEDNIMVTFRNQASRPYSFYSSLISYEEDQRQGAEPRKNFVKPNETKTYFWKVQHHMAPTKDEFDCKAWAYFSDVDLEKDVHSGLIGPLLVCHTNTLNPAHGRQVTVQEFALFFTIFDETKSWYFTENMERNCRAPCNIQMEDPTFKENYRFHAINGYIMDTLPGLVMAQDQRIRWYLLSMGSNENIHSIHFSGHVFTVRKKEEYKMALYNLYPGVFETVEMLPSKAGIWRVECLIGEHLHAGMSTLFLVYSNKCQTPLGMASGHIRDFQITASGQYGQWAPKLARLHYSGSINAWSTKEPFSWIKVDLLAPMIIHGIKTQGARQKFSSLYISQFIIMYSLDGKKWQTYRGNSTGTLMVFFGNVDSSGIKHNIFNPPIIARYIRLHPTHYSIRSTLRMELMGCDLNSCSMPLGMESKAISDAQITASSYFTNMFATWSPSKARLHLQGRSNAWRPQVNNPKEWLQVDFQKTMKVTGVTTQGVKSLLTSMYVKEFLISSSQDGHQWTLFFQNGKVKVFQGNQDSFTPVVNSLDPPLLTRYLRIHPQSWVHQIALRMEVLGCEAQDLY

SEQ ID NO: 2779 - DNA, 4371 bp, synthetic construct
  misc_feature 1..4371: note = Variant of human B-domain deleted Factor VIII
  source 1..4371: mol_type = other DNA
atgcagattgaactgtctacctgcttcttcctctgtttgctgaggttctgctttagcgccactagacggtactaccttggcgctgtggagctgtcctgggactatatgcagagtgatttgggagagcttcccgtcgacgcacgatttcctcctcgcgttccaaagtcatttcccttcaacacaagcgtggtgtacaagaagacgctcttcgtcgaattcaccgatcacctgttcaatatcgccaaacccagaccaccatggatgggtcttttggggcctaccatacaagcggaggtgtatgacacagttgttatcactctcaagaacatggcttctcatccggtaagtcttcacgcagtgggcgtgtcctactggaaagcttcagaaggagccgagtatgatgatcagacatcccagagggagaaagaagacgacaaggtatttccaggtgggtctcatacctatgtgtggcaagtgctcaaagagaatggccctatggcaagcgatccgctctgtttgacttacagctacctttcacacgttgacctcgtcaaggacctcaactccgggttgattggagccttgttggtatgcagggaaggatctcttgccaaagagaagacacagaccctccacaagtttatccttctctttgctgtgttcgatgagggcaaaagttggcatagcgaaacgaagaattccctcatgcaggatcgcgacgcagccagcgccagagcttggcccaagatgcacactgtgaacggatatgtcaataggtcacttcctggcttgattgggtgtcatcggaaaagtgtctactggcacgtgatcggaatggggacaacaccagaggtccactccatatttctcgaaggccataccttccttgttcgaaaccacagacaggcatccttggagatctctcccattacctttctcactgcccaaacgctccttatggacttgggtcagttccttctcttctgccatatcagctcacaccagcatgatggtatggaagcttatgtgaaagtcgacagttgtcctgaggagccacagttgcgcatgaagaataatgaagaagccgaggattacgacgacgatctcaccgattctgagatggacgtggtgaggtttgatgacgacaactctccctccttcattcaaatccggagcgtggcgaagaaacaccccaagacttgggtccactatatagcggcggaagaggaggattgggattacgctcctcttgtattggcaccagatgaccgctcatacaaaagccagtacctcaacaacggaccgcagagaattggccggaagtataagaaagtgcgatttatggcctatacagacgaaacctttaagacaagggaggccatccagcatgagagtgggattttgggacctcttctttacggcgaagttggtgataccctcctcatcatcttcaagaatcaagcttctcgcccctataacatttacccacacgggatcactgacgttaggcctttgtatagcagaagacttcccaaaggcgtgaagcatctcaaagacttccccattttgccaggcgagatctttaagtacaaatggaccgtcacagtggaagatggaccgactaaatcagaccctcgatgccttacgcggtactattcctccttcgtgaatatggagagagatttggcaagcggactcataggaccactcctcatctgttacaaggaatctgtagaccagaggggtaaccagattatgagtgataaacgcaatgtgatcctttttagcgtcttcgacgagaaccggtcctggtacttgaccgagaatatacaaaggttccttcccaaccccgcaggcgttcagttggaagaccctgagtttcaggccagcaatattatgcactcaatcaacggctatgtgtttgatagtctccagctttctgtttgcctccatgaagtagcctattggtacatcttgtcaattggtgctcaaacagacttcctctccgtcttcttctccggctacacctttaagcacaagatggtgtatgaggacactctcacactctttccattttctggagaaaccgtgttcatgagcatggagaatccaggcctttggatcttgggttgccacaacagtgattttcgcaatcggggaatgactgctctcctcaaagtcagcagctgtgataagaacacaggcgactattacgaagattcttacgaggacataagtgcctacttgttgtccaagaataacgccattgagcccagatcattctcccagaatcctcccgtgcttaaaaggcatcagcgcgaaatcaccagaactactcttcagtctgatcaagaggagattgactatgacgacaccataagcgtggaaatgaagaaggaggatttcgatatctatgacgaagatgagaaccagtctccgcggagctttcagaagaagacgcgacactacttcattgcagcagtcgaaaggctttgggactacggtatgtcatcatcccctcatgtgttgcgcaatagagctcagagtggaagtgttccacagttcaagaaagtcgtctttcaagagtttacagatggcagcttcacacagcctctctatcggggcgagcttaacgaacatttgggactccttggtccctatatccgagccgaagtggaggacaacattatggttacctttaggaatcaagcctctcgcccctacagcttctactcctccctcatcagttatgaggaggatcagagacaaggcgctgaaccacggaagaactttgtgaaaccgaatgagacgaagacctacttctggaaagtacagcaccacatggcccccacaaaagacgaattcgattgcaaagcatgggcgtatttttcagacgttgacttggagaaagatgtacattcaggacttattggtcctttgttggtgtgtcacactaacactctcaatccagcccatggcaggcaggtgacagtccaggaattcgctcttttctttaccatctttgatgagaccaagtcctggtacttcacggaaaacatggagcgcaattgcagagccccctgtaacatacagatggaggaccctacctttaaggaaaattatcggttccacgcaatcaacggatacattatggatacactccctggccttgtgatggctcaggaccaacgaatcaggtggtacctcctcagcatgggttctaatgagaacatacactccattcacttttcaggacatgtgttcactgtccggaagaaagaagagtataagatggccctctacaatttgtatccaggcgtgtttgagaccgttgaaatgcttccctctaaagctggcatctggagagtagagtgcttgatcggagaacatcttcacgcaggtatgagcaccttgttcctcgtgtacagcaacaaatgtcagaccccacttggcatggccagtggacacattcgcgactttcagatcacagcatctggccagtatggacaatgggccccaaagttggctcgcctccattactccggtagcataaatgcgtggtccactaaagaacctttcagctggattaaggtcgatcttcttgcccccatgatcatccacggcattaagacacagggagcgaggcagaaattctcctccctctacatctcacagttcattattatgtatagtttggacggcaagaagtggcaaacttatagaggtaacagtactggaacactcatggtgttcttcggcaacgttgatagctctggcatcaaacacaacatctttaatcctcccataatagctcggtacatcagattgcatccgacccactacagcattaggagtacactccgaatggagcttatgggttgcgacttgaattcctgttcaatgccactcggaatggagtctaaagccatctctgatgcacagataaccgccagtagctactttacgaacatgtttgctacgtggtcaccctctaaggcaaggcttcatttgcaaggccggtctaatgcctggagacctcaggtgaacaacccgaaagaatggctccaggtggactttcagaagaccatgaaagtaacaggtgtcactactcagggagttaagtccttgattaccagcatgtatgtgaaggagttccttatttcctcatcacaagatggccaccagtggaccctcttctttcagaatggtaaggtcaaagtgtttcagggcaatcaagacagcttcacacccgtggtgaacagtcttgatcctccactcttgacacgataccttcgaatccatccacagtcttgggttcaccagattgcattgcgcatggaagtacttggatgcgaggctcaggacctctac

SEQ ID NO: 2780 - protein, 1457 aa, synthetic construct
  REGION 1..1457: note = Variant of human B-domain deleted Factor VIII
MQIELSTCFFLCLLRFCFSATRRYYLGAVELSWDYMQSDLGELPVDARFPPRVPKSFPFNTSVVYKKTLFVEFTDHLFNIAKPRPPWMGLLGPTIQAEVYDTVVITLKNMASHPVSLHAVGVSYWKASEGAEYDDQTSQREKEDDKVFPGGSHTYVWQVLKENGPMASDPLCLTYSYLSHVDLVKDLNSGLIGALLVCREGSLAKEKTQTLHKFILLFAVFDEGKSWHSETKNSLMQDRDAASARAWPKMHTVNGYVNRSLPGLIGCHRKSVYWHVIGMGTTPEVHSIFLEGHTFLVRNHRQASLEISPITFLTAQTLLMDLGQFLLFCHISSHQHDGMEAYVKVDSCPEEPQLRMKNNEEAEDYDDDLTDSEMDVVRFDDDNSPSFIQIRSVAKKHPKTWVHYIAAEEEDWDYAPLVLAPDDRSYKSQYLNNGPQRIGRKYKKVRFMAYTDETFKTREAIQHESGILGPLLYGEVGDTLLIIFKNQASRPYNIYPHGITDVRPLYSRRLPKGVKHLKDFPILPGEIFKYKWTVTVEDGPTKSDPRCLTRYYSSFVNMERDLASGLIGPLLICYKESVDQRGNQIMSDKRNVILFSVFDENRSWYLTENIQRFLPNPAGVQLEDPEFQASNIMHSINGYVFDSLQLSVCLHEVAYWYILSIGAQTDFLSVFFSGYTFKHKMVYEDTLTLFPFSGETVFMSMENPGLWILGCHNSDFRNRGMTALLKVSSCDKNTGDYYEDSYEDISAYLLSKNNAIEPRSFSQNPPVLKRHQREITRTTLQSDQEEIDYDDTISVEMKKEDFDIYDEDENQSPRSFQKKTRHYFIAAVERLWDYGMSSSPHVLRNRAQSGSVPQFKKVVFQEFTDGSFTQPLYRGELNEHLGLLGPYIRAEVEDNIMVTFRNQASRPYSFYSSLISYEEDQRQGAEPRKNFVKPNETKTYFWKVQHHMAPTKDEFDCKAWAYFSDVDLEKDVHSGLIGPLLVCHTNTLNPAHGRQVTVQEFALFFTIFDETKSWYFTENMERNCRAPCNIQMEDPTFKENYRFHAINGYIMDTLPGLVMAQDQRIRWYLLSMGSNENIHSIHFSGHVFTVRKKEEYKMALYNLYPGVFETVEMLPSKAGIWRVECLIGEHLHAGMSTLFLVYSNKCQTPLGMASGHIRDFQITASGQYGQWAPKLARLHYSGSINAWSTKEPFSWIKVDLLAPMIIHGIKTQGARQKFSSLYISQFIIMYSLDGKKWQTYRGNSTGTLMVFFGNVDSSGIKHNIFNPPIIARYIRLHPTHYSIRSTLRMELMGCDLNSCSMPLGMESKAISDAQITASSYFTNMFATWSPSKARLHLQGRSNAWRPQVNNPKEWLQVDFQKTMKVTGVTTQGVKSLITSMYVKEFLISSSQDGHQWTLFFQNGKVKVFQGNQDSFTPVVNSLDPPLLTRYLRIHPQSWVHQIALRMEVLGCEAQDLY

SEQ ID NO: 2781 - DNA, 4371 bp, synthetic construct
  misc_feature 1..4371: note = Variant of human B-domain deleted Factor VIII
  source 1..4371: mol_type = other DNA
atgcagattgaactgtctacctgcttcttcctctgtttgctgaggttctgctttagcgccactagacggtactaccttggcgctgtggagctgtcctgggactatatgcagagtgatttgggagagcttcccgtcgacgcacgatttcctcctcgcgttccaaagtcatttcccttcaacacaagcgtggtgtacaagaagacgctcttcgtcgaattcaccgatcacctgttcaatatcgccaaacccagaccaccatggatgggtcttttggggcctaccatacaagcggaggtgtatgacacagttgttatcactctcaagaacatggcttctcatccggtaagtcttcacgcagtgggcgtgtcctactggaaagcttcagaaggagccgagtatgatgatcagacatcccagagggagaaagaagacgacaaggtatttccaggtgggtctcatacctatgtgtggcaagtgctcaaagagaatggccctatggcaagcgatccgctctgtttgacttacagctacctttcacacgttgacctcgtcaaggacctcaactccgggttgattggagccttgttggtatgcagggaaggatctcttgccaaagagaagacacagaccctccacaagtttatccttctctttgctgtgttcgatgagggcaaaagttggcatagcgaaacgaagaattccctcatgcaggatcgcgacgcagccagcgccagagcttggcccaagatgcacactgtgaacggatatgtcaataggtcacttcctggcttgattgggtgtcatcggaaaagtgtctactggcacgtgatcggaatggggacaacaccagaggtccactccatatttctcgaaggccataccttccttgttcgaaaccacagacaggcatccttggagatctctcccattacctttctcactgcccaaacgctccttatggacttgggtcagttccttctcttctgccatatcagctcacaccagcatgatggtatggaagcttatgtgaaagtcgacagttgtcctgaggagccacagttgcgcatgaagaataatgaagaagccgaggattacgacgacgatctcaccgattctgagatggacgtggtgaggtttgatgacgacaactctccctccttcattcaaatccggagcgtggcgaagaaacaccccaagacttgggtccactatatagcggcggaagaggaggattgggattacgctcctcttgtattggcaccagatgaccgctcatacaaaagccagtacctcaacaacggaccgcagagaattggccggaagtataagaaagtgcgatttatggcctatacagacgaaacctttaagacaagggaggccatccagcatgagagtgggattttgggacctcttctttacggcgaagttggtgataccctcctcatcatcttcaagaatcaagcttctcgcccctataacatttacccacacgggatcactgacgttaggcctttgtatagcagaagacttcccaaaggcgtgaagcatctcaaagacttccccattttgccaggcgagatctttaagtacaaatggaccgtcacagtggaagatggaccgactaaatcagaccctcgatgccttacgcggtactattcctccttcgtgaatatggagagagatttggcaagcggactcataggaccactcctcatctgttacaaggaatctgtagaccagaggggtaaccagattatgagtgataaacgcaatgtgatcctttttagcgtcttcgacgagaaccggtcctggtacttgaccgagaatatacaaaggttccttcccaaccccgcaggcgttcagttggaagaccctgagtttcaggccagcaatattatgcactcaatcaacggctatgtgtttgatagtctccagctttctgtttgcctccatgaagtagcctattggtacatcttgtcaattggtgctcaaacagacttcctctccgtcttcttctccggctacacctttaagcacaagtgggtgtatgaggacactctcacactctttccattttctggagaaaccgtgttcatgagcatggagaatccaggcctttggatcttgggttgccacaacagtgattttcgcaatcggggaatgactgctctcctcaaagtcagcagctgtgataagaacacaggcgactattacgaagattcttacgaggacataagtgcctacttgttgtccaagaataacgccattgagcccagatcattctcccagaatcctcccgtgcttaaaaggcatcagcgcgaaatcaccagaactactcttcagtctgatcaagaggagattgactatgacgacaccataagcgtggaaatgaagaaggaggatttcgatatctatgacgaagatgagaaccagtctccgcggagctttcagaagaagacgcgacactacttcattgcagcagtcgaaaggctttgggactacggtatgtcatcatcccctcatgtgttgcgcaatagagctcagagtggaagtgttccacagttcaagaaagtcgtctttcaagagtttacagatggcagcttcacacagcctctctatcggggcgagcttaacgaacatttgggactccttggtccctatatccgagccgaagtggaggacaacattatggttacctttaggaatcaagcctctcgcccctacagcttctactcctccctcatcagttatgaggaggatcagagacaaggcgctgaaccacggaagaactttgtgaaaccgaatgagacgaagacctacttctggaaagtacagcaccacatggcccccacaaaagacgaattcgattgcaaagcatgggcgtatttttcagacgttgacttggagaaagatgtacattcaggacttattggtcctttgttggtgtgtcacactaacactctcaatccagcccatggcaggcaggtgacagtccaggaattcgctcttttctttaccatctttgatgagaccaagtcctggtacttcacggaaaacatggagcgcaattgcagagccccctgtaacatacagatggaggaccctacctttaaggaaaattatcggttccacgcaatcaacggatacattatggatacactccctggccttgtgatggctcaggaccaacgaatcaggtggtacctcctcagcatgggttctaatgagaacatacactccattcacttttcaggacatgtgttcactgtccggaagaaagaagagtataagatggccctctacaatttgtatccaggcgtgtttgagaccgttgaaatgcttccctctaaagctggcatctggagagtagagtgcttgatcggagaacatcttcacgcaggtatgagcaccttgttcctcgtgtacagcaacaaatgtcagaccccacttggcatggccagtggacacattcgcgactttcagatcacagcatctggccagtatggacaatgggccccaaagttggctcgcctccattactccggtagcataaatgcgtggtccactaaagaacctttcagctggattaaggtcgatcttcttgcccccatgatcatccacggcattaagacacagggagcgaggcagaaattctcctccctctacatctcacagttcattattatgtatagtttggacggcaagaagtggcaaacttatagaggtaacagtactggaacactcatggtgttcttcggcaacgttgatagctctggcatcaaacacaacatctttaatcctcccataatagctcggtacatcagattgcatccgacccactacagcattaggagtacactccgaatggagcttatgggttgcgacttgaattcctgttcaatgccactcggaatggagtctaaagccatctctgatgcacagataaccgccagtagctactttacgaacatgtttgctacgtggtcaccctctaaggcaaggcttcatttgcaaggccggtctaatgcctggagacctcaggtgaacaacccgaaagaatggctccaggtggactttcagaagaccatgaaagtaacaggtgtcactactcagggagttaagtccttgctcaccagcatgtatgtgaaggagttccttatttcctcatcacaagatggccaccagtggaccctcttctttcagaatggtaaggtcaaagtgtttcagggcaatcaagacagcttcacacccgtggtgaacagtcttgatcctccactcttgacacgataccttcgaatccatccacagtcttgggttcaccagattgcattgcgcatggaagtacttggatgcgaggctcaggacctctac

SEQ ID NO: 2782 - protein, 1457 aa, synthetic construct
  REGION 1..1457: note = Variant of human B-domain deleted Factor VIII
MQIELSTCFFLCLLRFCFSATRRYYLGAVELSWDYMQSDLGELPVDARFPPRVPKSFPFNTSVVYKKTLFVEFTDHLFNIAKPRPPWMGLLGPTIQAEVYDTVVITLKNMASHPVSLHAVGVSYWKASEGAEYDDQTSQREKEDDKVFPGGSHTYVWQVLKENGPMASDPLCLTYSYLSHVDLVKDLNSGLIGALLVCREGSLAKEKTQTLHKFILLFAVFDEGKSWHSETKNSLMQDRDAASARAWPKMHTVNGYVNRSLPGLIGCHRKSVYWHVIGMGTTPEVHSIFLEGHTFLVRNHRQASLEISPITFLTAQTLLMDLGQFLLFCHISSHQHDGMEAYVKVDSCPEEPQLRMKNNEEAEDYDDDLTDSEMDVVRFDDDNSPSFIQIRSVAKKHPKTWVHYIAAEEEDWDYAPLVLAPDDRSYKSQYLNNGPQRIGRKYKKVRFMAYTDETFKTREAIQHESGILGPLLYGEVGDTLLIIFKNQASRPYNIYPHGITDVRPLYSRRLPKGVKHLKDFPILPGEIFKYKWTVTVEDGPTKSDPRCLTRYYSSFVNMERDLASGLIGPLLICYKESVDQRGNQIMSDKRNVILFSVFDENRSWYLTENIQRFLPNPAGVQLEDPEFQASNIMHSINGYVFDSLQLSVCLHEVAYWYILSIGAQTDFLSVFFSGYTFKHKWVYEDTLTLFPFSGETVFMSMENPGLWILGCHNSDFRNRGMTALLKVSSCDKNTGDYYEDSYEDISAYLLSKNNAIEPRSFSQNPPVLKRHQREITRTTLQSDQEEIDYDDTISVEMKKEDFDIYDEDENQSPRSFQKKTRHYFIAAVERLWDYGMSSSPHVLRNRAQSGSVPQFKKVVFQEFTDGSFTQPLYRGELNEHLGLLGPYIRAEVEDNIMVTFRNQASRPYSFYSSLISYEEDQRQGAEPRKNFVKPNETKTYFWKVQHHMAPTKDEFDCKAWAYFSDVDLEKDVHSGLIGPLLVCHTNTLNPAHGRQVTVQEFALFFTIFDETKSWYFTENMERNCRAPCNIQMEDPTFKENYRFHAINGYIMDTLPGLVMAQDQRIRWYLLSMGSNENIHSIHFSGHVFTVRKKEEYKMALYNLYPGVFETVEMLPSKAGIWRVECLIGEHLHAGMSTLFLVYSNKCQTPLGMASGHIRDFQITASGQYGQWAPKLARLHYSGSINAWSTKEPFSWIKVDLLAPMIIHGIKTQGARQKFSSLYISQFIIMYSLDGKKWQTYRGNSTGTLMVFFGNVDSSGIKHNIFNPPIIARYIRLHPTHYSIRSTLRMELMGCDLNSCSMPLGMESKAISDAQITASSYFTNMFATWSPSKARLHLQGRSNAWRPQVNNPKEWLQVDFQKTMKVTGVTTQGVKSLLTSMYVKEFLISSSQDGHQWTLFFQNGKVKVFQGNQDSFTPVVNSLDPPLLTRYLRIHPQSWVHQIALRMEVLGCEAQDLY

SEQ ID NO: 2783 - DNA, 4371 bp, synthetic construct
  misc_feature 1..4371: note = Variant of human B-domain deleted Factor VIII
  source 1..4371: mol_type = other DNA
atgcagattgaactgtctacctgcttcttcctctgtttgctgaggttctgctttagcgccactagacggtactaccttggcgctgtggagctgtcctgggactatatgcagagtgatttgggagagcttcccgtcgacgcacgatttcctcctcgcgttccaaagtcatttcccttcaacacaagcgtggtgtacaagaagacgctcttcgtcgaattcaccgatcacctgttcaatatcgccaaacccagaccaccatggatgggtcttttggggcctaccatacaagcggaggtgtatgacacagttgttatcactctcaagaacatggcttctcatccggtaagtcttcacgcagtgggcgtgtcctactggaaagcttcagaaggagccgagtatgatgatcagacatcccagagggagaaagaagacgacaaggtatttccaggtgggtctcatacctatgtgtggcaagtgctcaaagagaatggccctatggcaagcgatccgctctgtttgacttacagctacctttcacacgttgacctcgtcaaggacctcaactccgggttgattggagccttgttggtatgcagggaaggatctcttgccaaagagaagacacagaccctccacaagtttatccttctctttgctgtgttcgatgagggcaaaagttggcatagcgaaacgaagaattccctcatgcaggatcgcgacgcagccagcgccagagcttggcccaagatgcacactgtgaacggatatgtcaataggtcacttcctggcttgattgggtgtcatcggaaaagtgtctactggcacgtgatcggaatggggacaacaccagaggtccactccatatttctcgaaggccataccttccttgttcgaaaccacagacaggcatccttggagatctctcccattacctttctcactgcccaaacgctccttatggacttgggtcagttccttctcttctgccatatcagctcacaccagcatgatggtatggaagcttatgtgaaagtcgacagttgtcctgaggagccacagttgcgcatgaagaataatgaagaagccgaggattacgacgacgatctcaccgattctgagatggacgtggtgaggtttgatgacgacaactctccctccttcattcaaatccggagcgtggcgaagaaacaccccaagacttgggtccactatatagcggcggaagaggaggattgggattacgctcctcttgtattggcaccagatgaccgctcatacaaaagccagtacctcaacaacggaccgcagagaattggccggaagtataagaaagtgcgatttatggcctatacagacgaaacctttaagacaagggaggccatccagcatgagagtgggattttgggacctcttctttacggcgaagttggtgataccctcctcatcatcttcaagaatcaagcttctcgcccctataacatttacccacacgggatcactgacgttaggcctttgtatagcagaagacttcccaaaggcgtgaagcatctcaaagacttccccattttgccaggcgagatctttaagtacaaatggaccgtcacagtggaagatggaccgactaaatcagaccctcgatgccttacgcggtactattcctccttcgtgaatatggagagagatttggcaagcggactcataggaccactcctcatctgttacaaggaatctgtagaccagaggggtaaccagattatgagtgataaacgcaatgtgatcctttttagcgtcttcgacgagaaccggtcctggtacttgaccgagaatatacaaaggttccttcccaaccccgcaggcgttcagttggaagaccctgagtttcaggccagcaatattatgcactcaatcaacggctatgtgtttgatagtctccagctttctgtttgcctccatgaagtagcctattggtacatcttgtcaattggtgctcaaacagacttcctctccgtcttcttctccggctacacctttaagcacaagatggtgtatgaggacactctcacactctttccattttctggagaaaccgtgttcatgagcatggagaatccaggcctttggatcttgggttgccacaacagtgattttcgcaatcggggaatgactgctctcctcaaagtcagcagctgtgataagaacacaggcgactattacgaagattcttacgaggacataagtgcctacttgttgtccaagaataacgccattgagcccagatcattctcccagaatcctcccgtgcttaaaaggcatcagcgcgaaatcaccagaactactcttcagtctgatcaagaggagattgactatgacgacaccataagcgtggaaatgaagaaggaggatttcgatatctatgacgaagatgagaaccagtctccgcggagctttcagaagaagacgcgacactacttcattgcagcagtcgaaaggctttgggactacggtatgtcatcatcccctcatgtgttgcgcaatagagctcagagtggaagtgttccacagttcaagaaagtcgtctttcaagagtttacagatggcagcttcacacagcctctctatcggggcgagcttaacgaacatttgggactccttggtccctatatccgagccgaagtggaggacaacattatggttacctttaggaatcaagcctctcgcccctacagcttctactcctccctcatcagttatgaggaggatcagagacaaggcgctgaaccacggaagaactttgtgaaaccgaatgagacgaagacctacttctggaaagtacagcaccacatggcccccacaaaagacgaattcgattgcaaagcatgggcgtatttttcagacgttgacttggagaaagatgtacattcaggacttattggtcctttgttggtgtgtcacactaacactctcaatccagcccatggcaggcaggtgacagtccaggaattcgctcttttctttaccatctttgatgagaccaagtcctggtacttcacggaaaacatggagcgcaattgcagagccccctgtaacatacagatggaggaccctacctttaaggaaaattatcggttccacgcaatcaacggatacattatggatacactccctggccttgtgatggctcaggaccaacgaatcaggtggtacctcctcagcatgggttctaatgagaacatacactccattcacttttcaggacatgtgttcactgtccggaagaaagaagagtataagatggccctctacaatttgtatccaggcgtgtttgagaccgttgaaatgcttccctctaaagctggcatctggagagtagagtgcttgatcggagaacatcttcacgcaggtatgagcaccttgttcctcgtgtacagcaacaaatgtcagaccccacttggcatggccagtggacacattcgcgactttcagatcacagcatctggccagtatggacaatgggccccaaagttggctcgcctccattactccggtagcataaatgcgtggtccactaaagaacctttcagctggattaaggtcgatcttcttgcccccatgatcatccacggcattaagacacagggagcgaggcagaaattctcctccctctacatctcacagttcattattatgtatagtttggacggcaagaagtggcaaacttatagaggtaacagtactggaacactcatggtgttcttcggcaacgttgatagctctggcatcaaacacaacatctttaatcctcccataatagctcggtacatcagattgcatccgacccactacagcattaggagtacactccgaatggagcttatgggttgcgacttgaattcctgttcaatgccactcggaatggagtctaaagccatctctgatgcacagataaccgccagtagctactttacgaacatgtttgctacgtggtcaccctctaaggcaaggcttcatttgcaaggccggtctaatgcctggagacctcaggtgaacaacccgaaagaatggctccaggtggactttcagaagaccatgaaagtaacaggtgtcactactcagggagttaagtccttgctcaccagcatgtatgtgaaggagttccttatttcctcatcacaagatggccaccagtggaccctcttctttcagaatggtaaggtcaaagtgtttcagggcaatcaagacggtttcacacccgtggtgaacagtcttgatcctccactcttgacacgataccttcgaatccatccacagtcttgggttcaccagattgcattgcgcatggaagtacttggatgcgaggctcaggacctctac

SEQ ID NO: 2784 - protein, 1457 aa, synthetic construct
  REGION 1..1457: note = Variant of human B-domain deleted Factor VIII
MQIELSTCFFLCLLRFCFSATRRYYLGAVELSWDYMQSDLGELPVDARFPPRVPKSFPFNTSVVYKKTLFVEFTDHLFNIAKPRPPWMGLLGPTIQAEVYDTVVITLKNMASHPVSLHAVGVSYWKASEGAEYDDQTSQREKEDDKVFPGGSHTYVWQVLKENGPMASDPLCLTYSYLSHVDLVKDLNSGLIGALLVCREGSLAKEKTQTLHKFILLFAVFDEGKSWHSETKNSLMQDRDAASARAWPKMHTVNGYVNRSLPGLIGCHRKSVYWHVIGMGTTPEVHSIFLEGHTFLVRNHRQASLEISPITFLTAQTLLMDLGQFLLFCHISSHQHDGMEAYVKVDSCPEEPQLRMKNNEEAEDYDDDLTDSEMDVVRFDDDNSPSFIQIRSVAKKHPKTWVHYIAAEEEDWDYAPLVLAPDDRSYKSQYLNNGPQRIGRKYKKVRFMAYTDETFKTREAIQHESGILGPLLYGEVGDTLLIIFKNQASRPYNIYPHGITDVRPLYSRRLPKGVKHLKDFPILPGEIFKYKWTVTVEDGPTKSDPRCLTRYYSSFVNMERDLASGLIGPLLICYKESVDQRGNQIMSDKRNVILFSVFDENRSWYLTENIQRFLPNPAGVQLEDPEFQASNIMHSINGYVFDSLQLSVCLHEVAYWYILSIGAQTDFLSVFFSGYTFKHKMVYEDTLTLFPFSGETVFMSMENPGLWILGCHNSDFRNRGMTALLKVSSCDKNTGDYYEDSYEDISAYLLSKNNAIEPRSFSQNPPVLKRHQREITRTTLQSDQEEIDYDDTISVEMKKEDFDIYDEDENQSPRSFQKKTRHYFIAAVERLWDYGMSSSPHVLRNRAQSGSVPQFKKVVFQEFTDGSFTQPLYRGELNEHLGLLGPYIRAEVEDNIMVTFRNQASRPYSFYSSLISYEEDQRQGAEPRKNFVKPNETKTYFWKVQHHMAPTKDEFDCKAWAYFSDVDLEKDVHSGLIGPLLVCHTNTLNPAHGRQVTVQEFALFFTIFDETKSWYFTENMERNCRAPCNIQMEDPTFKENYRFHAINGYIMDTLPGLVMAQDQRIRWYLLSMGSNENIHSIHFSGHVFTVRKKEEYKMALYNLYPGVFETVEMLPSKAGIWRVECLIGEHLHAGMSTLFLVYSNKCQTPLGMASGHIRDFQITASGQYGQWAPKLARLHYSGSINAWSTKEPFSWIKVDLLAPMIIHGIKTQGARQKFSSLYISQFIIMYSLDGKKWQTYRGNSTGTLMVFFGNVDSSGIKHNIFNPPIIARYIRLHPTHYSIRSTLRMELMGCDLNSCSMPLGMESKAISDAQITASSYFTNMFATWSPSKARLHLQGRSNAWRPQVNNPKEWLQVDFQKTMKVTGVTTQGVKSLLTSMYVKEFLISSSQDGHQWTLFFQNGKVKVFQGNQDGFTPVVNSLDPPLLTRYLRIHPQSWVHQIALRMEVLGCEAQDLY

SEQ ID NO: 2785 - DNA, 4371 bp, synthetic construct
  misc_feature 1..4371: note = Variant of human B-domain deleted Factor VIII
  source 1..4371: mol_type = other DNA
atgcagattgaactgtctacctgcttcttcctctgtttgctgaggttctgctttagcgccactagacggtactaccttggcgctgtggagctgtcctgggactatatgcagagtgatttgggagagcttcccgtcgacgcacgatttcctcctcgcgttccaaagtcatttcccttcaacacaagcgtggtgtacaagaagacgctcttcgtcgaattcaccgatcacctgttcaatatcgccaaacccagaccaccatggatgggtcttttggggcctaccatacaagcggaggtgtatgacacagttgttatcactctcaagaacatggcttctcatccggtaagtcttcacgcagtgggcgtgtcctactggaaagcttcagaaggagccgagtatgatgatcagacatcccagagggagaaagaagacgacaaggtatttccaggtgggtctcatacctatgtgtggcaagtgctcaaagagaatggccctatggcaagcgatccgctctgtttgacttacagctacctttcacacgttgacctcgtcaaggacctcaactccgggttgattggagccttgttggtatgcagggaaggatctcttgccaaagagaagacacagaccctccacaagtttatccttctctttgctgtgttcgatgagggcaaaagttggcatagcgaaacgaagaattccctcatgcaggatcgcgacgcagccagcgccagagcttggcccaagatgcacactgtgaacggatatgtcaataggtcacttcctggcttgattgggtgtcatcggaaaagtgtctactggcacgtgatcggaatggggacaacaccagaggtccactccatatttctcgaaggccataccttccttgttcgaaaccacagacaggcatccttggagatctctcccattacctttctcactgcccaaacgctccttatggacttgggtcagttccttctcttctgccatatcagctcacaccagcatgatggtatggaagcttatgtgaaagtcgacagttgtcctgaggagccacagttgcgcatgaagaataatgaagaagccgaggattacgacgacgatctcaccgattctgagatggacgtggtgaggtttgatgacgacaactctccctccttcattcaaatccggagcgtggcgaagaaacaccccaagacttgggtccactatatagcggcggaagaggaggattgggattacgctcctcttgtattggcaccagatgaccgctcatacaaaagccagtacctcaacaacggaccgcagagaattggccggaagtataagaaagtgcgatttatggcctatacagacgaaacctttaagacaagggaggccatccagcatgagagtgggattttgggacctcttctttacggcgaagttggtgataccctcctcatcatcttcaagaatcaagcttctcgcccctataacatttacccacacgggatcactgacgttaggcctttgtatagcagaagacttcccaaaggcgtgaagcatctcaaagacttccccattttgccaggcgagatctttaagtacaaatggaccgtcacagtggaagatggaccgactaaatcagaccctcgatgccttacgcggtactattcctccttcgtgaatatggagagagatttggcaagcggactcataggaccactcctcatctgttacaaggaatctgtagaccagaggggtaaccagattatgagtgataaacgcaatgtgatcctttttagcgtcttcgacgagaaccggtcctggtacttgaccgagaatatacaaaggttccttcccaaccccgcaggcgttcagttggaagaccctgagtttcaggccagcaatattatgcactcaatcaacggctatgtgtttgatagtctccagctttctgtttgcctccatgaagtagcctattggtacatcttgtcaattggtgctcaaacagacttcctctccgtcttcttctccggctacacctttaagcacaagatggtgtatgaggacactctcacactctttccattttctggagaaaccgtgttcatgagcatggagaatccaggcctttggatcttgggttgccacaacagtgattttcgcaatcggggaatgactgctctcctcaaagtcagcagctgtgataagaacacaggcgactattacgaagattcttacgaggacataagtgcctacttgatgtccaagaataacgccattgagcccagatcattctcccagaatcctcccgtgcttaaaaggcatcagcgcgaaatcaccagaactactcttcagtctgatcaagaggagattgactatgacgacaccataagcgtggaaatgaagaaggaggatttcgatatctatgacgaagatgagaaccagtctccgcggagctttcagaagaagacgcgacactacttcattgcagcagtcgaaaggctttgggactacggtatgtcatcatcccctcatgtgttgcgcaatagagctcagagtggaagtgttccacagttcaagaaagtcgtctttcaagagtttacagatggcagcttcacacagcctctctatcggggcgagcttaacgaacatttgggactccttggtccctatatccgagccgaagtggaggacaacattatggttacctttaggaatcaagcctctcgcccctacagcttctactcctccctcatcagttatgaggaggatcagagacaaggcgctgaaccacggaagaactttgtgaaaccgaatgagacgaagacctacttctggaaagtacagcaccacatggcccccacaaaagacgaattcgattgcaaagcatgggcgtatttttcagacgttgacttggagaaagatgtacattcaggacttattggtcctttgttggtgtgtcacactaacactctcaatccagcccatggcaggcaggtgacagtccaggaattcgctcttttctttaccatctttgatgagaccaagtcctggtacttcacggaaaacatggagcgcaattgcagagccccctgtaacatacagatggaggaccctacctttaaggaaaattatcggttccacgcaatcaacggatacattatggatacactccctggccttgtgatggctcaggaccaacgaatcaggtggtacctcctcagcatgggttctaatgagaacatacactccattcacttttcaggacatgtgttcactgtccggaagaaagaagagtataagatggccctctacaatttgtatccaggcgtgtttgagaccgttgaaatgcttccctctaaagctggcatctggagagtagagtgcttgatcggagaacatcttcacgcaggtatgagcaccttgttcctcgtgtacagcaacaaatgtcagaccccacttggcatggccagtggacacattcgcgactttcagatcacagcatctggccagtatggacaatgggccccaaagttggctcgcctccattactccggtagcataaatgcgtggtccactaaagaacctttcagctggattaaggtcgatcttcttgcccccatgatcatccacggcattaagacacagggagcgaggcagaaattctcctccctctacatctcacagttcattattatgtatagtttggacggcaagaagtggcaaacttatagaggtaacagtactggaacactcatggtgttcttcggcaacgttgatagctctggcatcaaacacaacatctttaatcctcccataatagctcggtacatcagattgcatccgacccactacagcattaggagtacactccgaatggagcttatgggttgcgacttgaattcctgttcaatgccactcggaatggagtctaaagccatctctgatgcacagataaccgccagtagctactttacgaacatgtttgctacgtggtcaccctctaaggcaaggcttcatttgcaaggccggtctaatgcctggagacctcaggtgaacaacccgaaagaatggctccaggtggactttcagaagaccatgaaagtaacaggtgtcactactcagggagttaagtccttgctcaccagcatgtatgtgaaggagttccttatttcctcatcacaagatggccaccagtggaccctcttctttcagaatggtaaggtcaaagtgtttcagggcaatcaagacagcttcacacccgtggtgaacagtcttgatcctccactcttgacacgataccttcgaatccatccacagtcttgggttcaccagattgcattgcgcatggaagtacttggatgcgaggctcaggacctctac

SEQ ID NO: 2786 - protein, 1457 aa, synthetic construct
  REGION 1..1457: note = Variant of human B-domain deleted Factor VIII
MQIELSTCFFLCLLRFCFSATRRYYLGAVELSWDYMQSDLGELPVDARFPPRVPKSFPFNTSVVYKKTLFVEFTDHLFNIAKPRPPWMGLLGPTIQAEVYDTVVITLKNMASHPVSLHAVGVSYWKASEGAEYDDQTSQREKEDDKVFPGGSHTYVWQVLKENGPMASDPLCLTYSYLSHVDLVKDLNSGLIGALLVCREGSLAKEKTQTLHKFILLFAVFDEGKSWHSETKNSLMQDRDAASARAWPKMHTVNGYVNRSLPGLIGCHRKSVYWHVIGMGTTPEVHSIFLEGHTFLVRNHRQASLEISPITFLTAQTLLMDLGQFLLFCHISSHQHDGMEAYVKVDSCPEEPQLRMKNNEEAEDYDDDLTDSEMDVVRFDDDNSPSFIQIRSVAKKHPKTWVHYIAAEEEDWDYAPLVLAPDDRSYKSQYLNNGPQRIGRKYKKVRFMAYTDETFKTREAIQHESGILGPLLYGEVGDTLLIIFKNQASRPYNIYPHGITDVRPLYSRRLPKGVKHLKDFPILPGEIFKYKWTVTVEDGPTKSDPRCLTRYYSSFVNMERDLASGLIGPLLICYKESVDQRGNQIMSDKRNVILFSVFDENRSWYLTENIQRFLPNPAGVQLEDPEFQASNIMHSINGYVFDSLQLSVCLHEVAYWYILSIGAQTDFLSVFFSGYTFKHKMVYEDTLTLFPFSGETVFMSMENPGLWILGCHNSDFRNRGMTALLKVSSCDKNTGDYYEDSYEDISAYLMSKNNAIEPRSFSQNPPVLKRHQREITRTTLQSDQEEIDYDDTISVEMKKEDFDIYDEDENQSPRSFQKKTRHYFIAAVERLWDYGMSSSPHVLRNRAQSGSVPQFKKVVFQEFTDGSFTQPLYRGELNEHLGLLGPYIRAEVEDNIMVTFRNQASRPYSFYSSLISYEEDQRQGAEPRKNFVKPNETKTYFWKVQHHMAPTKDEFDCKAWAYFSDVDLEKDVHSGLIGPLLVCHTNTLNPAHGRQVTVQEFALFFTIFDETKSWYFTENMERNCRAPCNIQMEDPTFKENYRFHAINGYIMDTLPGLVMAQDQRIRWYLLSMGSNENIHSIHFSGHVFTVRKKEEYKMALYNLYPGVFETVEMLPSKAGIWRVECLIGEHLHAGMSTLFLVYSNKCQTPLGMASGHIRDFQITASGQYGQWAPKLARLHYSGSINAWSTKEPFSWIKVDLLAPMIIHGIKTQGARQKFSSLYISQFIIMYSLDGKKWQTYRGNSTGTLMVFFGNVDSSGIKHNIFNPPIIARYIRLHPTHYSIRSTLRMELMGCDLNSCSMPLGMESKAISDAQITASSYFTNMFATWSPSKARLHLQGRSNAWRPQVNNPKEWLQVDFQKTMKVTGVTTQGVKSLLTSMYVKEFLISSSQDGHQWTLFFQNGKVKVFQGNQDSFTPVVNSLDPPLLTRYLRIHPQSWVHQIALRMEVLGCEAQDLY

SEQ ID NO: 2787 - DNA, 4371 bp, synthetic construct
  misc_feature 1..4371: note = Variant of human B-domain deleted Factor VIII
  source 1..4371: mol_type = other DNA
atgcagattgaactgtctacctgcttcttcctctgtttgctgaggttctgctttagcgccactagacggtactaccttggcgctgtggagctgtcctgggactatatgcagagtgatttgggagagcttcccgtcgacgcacgatttcctcctcgcgttccaaagtcatttcccttcaacacaagcgtggtgtacaagaagacgctcttcgtcgaattcaccgatcacctgttcaatatcgccaaacccagaccaccatggatgggtcttttggggcctaccatacaagcggaggtgtatgacacagttgttatcactctcaagaacatggcttctcatccggtaagtcttcacgcagtgggcgtgtcctactggaaagcttcagaaggagccgagtatgatgatcagacatcccagagggagaaagaagacgacaaggtatttccaggtgggtctcatacctatgtgtggcaagtgctcaaagagaatggccctatggcaagcgatccgctctgtttgacttacagctacctttcacacgttgacctcgtcaaggacctcaactccgggttgattggagccttgttggtatgcagggaaggatctcttgccaaagagaagacacagaccctccacaagtttatccttctctttgctgtgttcgatgagggcaaaagttggcatagcgaaacgaagaattccctcatgcaggatcgcgacgcagccagcgccagagcttggcccaagatgcacactgtgaacggatatgtcaataggtcacttcctggcttgattgggtgtcatcggaaaagtgtctactggcacgtgatcggaatggggacaacaccagaggtccactccatatttctcgaaggccataccttccttgttcgaaaccacagacaggcatccttggagatctctcccattacctttctcactgcccaaacgctccttatggacttgggtcagttccttctcttctgccatatcagctcacaccagcatgatggtatggaagcttatgtgaaagtcgacagttgtcctgaggagccacagttgcgcatgaagaataatgaagaagccgaggattacgacgacgatctcaccgattctgagatggacgtggtgaggtttgatgacgacaactctccctccttcattcaaatccggagcgtggcgaagaaacaccccaagacttgggtccactatatagcggcggaagaggaggattgggattacgctcctcttgtattggcaccagatgaccgctcatacaaaagccagtacctcaacaacggaccgcagagaattggccggaagtataagaaagtgcgatttatggcctatacagacgaaacctttaagacaagggaggccatccagcatgagagtgggattttgggacctcttctttacggcgaagttggtgataccctcctcatcatcttcaagaatcaagcttctcgcccctataacatttacccacacgggatcactgacgttaggcctttgtatagcagaagacttcccaaaggcgtgaagcatctcaaagacttccccattttgccaggcgagatctttaagtacaaatggaccgtcacagtggaagatggaccgactaaatcagaccctcgatgccttacgcggtactattcctccttcgtgaatatggagagagatttggcaagcggactcataggaccactcctcatctgttacaaggaatctgtagaccagaggggtaaccagattatgagtgataaacgcaatgtgatcctttttagcgtcttcgacgagaaccggtcctggtacttgaccgagaatatacaaaggttccttcccaaccccgcaggcgttcagttggaagaccctgagtttcaggccagcaatattatgcactcaatcaacggctatgtgtttgatagtctccagctttctgtttgcctccatgaagtagcctattggtacatcttgtcaattggtgctcaaacagacttcctctccgtcttcttctccggctacacctttaagcacaagatggtgtatgaggacactctcacactctttccattttctggagaaaccgtgttcatgagcatggagaatccaggcctttggatcttgggttgccacaacagtgattttcgcaatcggggaatgactgctctcctcaaagtcagcagctgtgataagaacacaggcgactattacgaagattcttacgaggacataagtgcctacttgttgtccaagaataacgccattgagcccagatcattctcccagaatcctcccgtgcttaaaaggcatcagcgcgaaatcaccagaactactcttcagtctgatcaagaggagattgactatgacgacaccataagcgtggaaatgaagaagactgatttcgatatctatgacgaagatgagaaccagtctccgcggagctttcagaagaagacgcgacactacttcattgcagcagtcgaaaggctttgggactacggtatgtcatcatcccctcatgtgttgcgcaatagagctcagagtggaagtgttccacagttcaagaaagtcgtctttcaagagtttacagatggcagcttcacacagcctctctatcggggcgagcttaacgaacatttgggactccttggtccctatatccgagccgaagtggaggacaacattatggttacctttaggaatcaagcctctcgcccctacagcttctactcctccctcatcagttatgaggaggatcagagacaaggcgctgaaccacggaagaactttgtgaaaccgaatgagacgaagacctacttctggaaagtacagcaccacatggcccccacaaaagacgaattcgattgcaaagcatgggcgtatttttcagacgttgacttggagaaagatgtacattcaggacttattggtcctttgttggtgtgtcacactaacactctcaatccagcccatggcaggcaggtgacagtccaggaattcgctcttttctttaccatctttgatgagaccaagtcctggtacttcacggaaaacatggagcgcaattgcagagccccctgtaacatacagatggaggaccctacctttaaggaaaattatcggttccacgcaatcaacggatacattatggatacactccctggccttgtgatggctcaggaccaacgaatcaggtggtacctcctcagcatgggttctaatgagaacatacactccattcacttttcaggacatgtgttcactgtccggaagaaagaagagtataagatggccctctacaatttgtatccaggcgtgtttgagaccgttgaaatgcttccctctaaagctggcatctggagagtagagtgcttgatcggagaacatcttcacgcaggtatgagcaccttgttcctcgtgtacagcaacaaatgtcagaccccacttggcatggccagtggacacattcgcgactttcagatcacagcatctggccagtatggacaatgggccccaaagttggctcgcctccattactccggtagcataaatgcgtggtccactaaagaacctttcagctggattaaggtcgatcttcttgcccccatgatcatccacggcattaagacacagggagcgaggcagaaattctcctccctctacatctcacagttcattattatgtatagtttggacggcaagaagtggcaaacttatagaggtaacagtactggaacactcatggtgttcttcggcaacgttgatagctctggcatcaaacacaacatctttaatcctcccataatagctcggtacatcagattgcatccgacccactacagcattaggagtacactccgaatggagcttatgggttgcgacttgaattcctgttcaatgccactcggaatggagtctaaagccatctctgatgcacagataaccgccagtagctactttacgaacatgtttgctacgtggtcaccctctaaggcaaggcttcatttgcaaggccggtctaatgcctggagacctcaggtgaacaacccgaaagaatggctccaggtggactttcagaagaccatgaaagtaacaggtgtcactactcagggagttaagtccttgctcaccagcatgtatgtgaaggagttccttatttcctcatcacaagatggccaccagtggaccctcttctttcagaatggtaaggtcaaagtgtttcagggcaatcaagacagcttcacacccgtggtgaacagtcttgatcctccactcttgacacgataccttcgaatccatccacagtcttgggttcaccagattgcattgcgcatggaagtacttggatgcgaggctcaggacctctac

SEQ ID NO: 2788 - protein, 1457 aa, synthetic construct
  REGION 1..1457: note = Variant of human B-domain deleted Factor VIII
MQIELSTCFFLCLLRFCFSATRRYYLGAVELSWDYMQSDLGELPVDARFPPRVPKSFPFNTSVVYKKTLFVEFTDHLFNIAKPRPPWMGLLGPTIQAEVYDTVVITLKNMASHPVSLHAVGVSYWKASEGAEYDDQTSQREKEDDKVFPGGSHTYVWQVLKENGPMASDPLCLTYSYLSHVDLVKDLNSGLIGALLVCREGSLAKEKTQTLHKFILLFAVFDEGKSWHSETKNSLMQDRDAASARAWPKMHTVNGYVNRSLPGLIGCHRKSVYWHVIGMGTTPEVHSIFLEGHTFLVRNHRQASLEISPITFLTAQTLLMDLGQFLLFCHISSHQHDGMEAYVKVDSCPEEPQLRMKNNEEAEDYDDDLTDSEMDVVRFDDDNSPSFIQIRSVAKKHPKTWVHYIAAEEEDWDYAPLVLAPDDRSYKSQYLNNGPQRIGRKYKKVRFMAYTDETFKTREAIQHESGILGPLLYGEVGDTLLIIFKNQASRPYNIYPHGITDVRPLYSRRLPKGVKHLKDFPILPGEIFKYKWTVTVEDGPTKSDPRCLTRYYSSFVNMERDLASGLIGPLLICYKESVDQRGNQIMSDKRNVILFSVFDENRSWYLTENIQRFLPNPAGVQLEDPEFQASNIMHSINGYVFDSLQLSVCLHEVAYWYILSIGAQTDFLSVFFSGYTFKHKMVYEDTLTLFPFSGETVFMSMENPGLWILGCHNSDFRNRGMTALLKVSSCDKNTGDYYEDSYEDISAYLLSKNNAIEPRSFSQNPPVLKRHQREITRTTLQSDQEEIDYDDTISVEMKKTDFDIYDEDENQSPRSFQKKTRHYFIAAVERLWDYGMSSSPHVLRNRAQSGSVPQFKKVVFQEFTDGSFTQPLYRGELNEHLGLLGPYIRAEVEDNIMVTFRNQASRPYSFYSSLISYEEDQRQGAEPRKNFVKPNETKTYFWKVQHHMAPTKDEFDCKAWAYFSDVDLEKDVHSGLIGPLLVCHTNTLNPAHGRQVTVQEFALFFTIFDETKSWYFTENMERNCRAPCNIQMEDPTFKENYRFHAINGYIMDTLPGLVMAQDQRIRWYLLSMGSNENIHSIHFSGHVFTVRKKEEYKMALYNLYPGVFETVEMLPSKAGIWRVECLIGEHLHAGMSTLFLVYSNKCQTPLGMASGHIRDFQITASGQYGQWAPKLARLHYSGSINAWSTKEPFSWIKVDLLAPMIIHGIKTQGARQKFSSLYISQFIIMYSLDGKKWQTYRGNSTGTLMVFFGNVDSSGIKHNIFNPPIIARYIRLHPTHYSIRSTLRMELMGCDLNSCSMPLGMESKAISDAQITASSYFTNMFATWSPSKARLHLQGRSNAWRPQVNNPKEWLQVDFQKTMKVTGVTTQGVKSLLTSMYVKEFLISSSQDGHQWTLFFQNGKVKVFQGNQDSFTPVVNSLDPPLLTRYLRIHPQSWVHQIALRMEVLGCEAQDLY

SEQ ID NO: 2789 - DNA, 4371 bp, synthetic construct
  misc_feature 1..4371: note = Variant of human B-domain deleted Factor VIII
  source 1..4371: mol_type = other DNA
atgcagattgaactgtctacctgcttcttcctctgtttgctgaggttctgctttagcgccactagacggtactaccttggcgctgtggagctgtcctgggactatatgcagagtgatttgggagagcttcccgtcgacgcacgatttcctcctcgcgttccaaagtcatttcccttcaacacaagcgtggtgtacaagaagacgctcttcgtcgaattcaccgatcacctgttcaatatcgccaaacccagaccaccatggatgggtcttttggggcctaccatacaagcggaggtgtatgacacagttgttatcactctcaagaacatggcttctcatccggtaagtcttcacgcagtgggcgtgtcctactggaaagcttcagaaggagccgagtatgatgatcagacatcccagagggagaaagaagacgacaaggtatttccaggtgggtctcatacctatgtgtggcaagtgctcaaagagaatggccctatggcaagcgatccgctctgtttgacttacagctacctttcacacgttgacctcgtcaaggacctcaactccgggttgattggagccttgttggtatgcagggaaggatctcttgccaaagagaagacacagaccctccacaagtttatccttctctttgctgtgttcgatgagggcaaaagttggcatagcgaaacgaagaattccctcatgcaggatcgcgacgcagccagcgccagagcttggcccaagatgcacactgtgaacggatatgtcaataggtcacttcctggcttgattgggtgtcatcggaaaagtgtctactggcacgtgatcggaatggggacaacaccagaggtccactccatatttctcgaaggccataccttccttgttcgaaaccacagacaggcatccttggagatctctcccattacctttctcactgcccaaacgactcttatggacttgggtcagttccttctcttctgccatatcagctcacaccagcatgatggtatggaagcttatgtgaaagtcgacagttgtcctgaggagccacagttgcgcatgaagaataatgaagaagccgaggattacgacgacgatctcaccgattctgagatggacgtggtgaggtttgatgacgacaactctccctccttcattcaaatccggagcgtggcgaagaaacaccccaagacttgggtccactatatagcggcggaagaggaggattgggattacgctcctcttgtattggcaccagatgaccgctcatacaaaagccagtacctcaacaacggaccgcagagaattggccggaagtataagaaagtgcgatttatggcctatacagacgaaacctttaagacaagggaggccatccagcatgagagtgggattttgggacctcttctttacggcgaagttggtgataccctcctcatcatcttcaagaatcaagcttctcgcccctataacatttacccacacgggatcactgacgttaggcctttgtatagcagaagacttcccaaaggcgtgaagcatctcaaagacttccccattttgccaggcgagatctttaagtacaaatggaccgtcacagtggaagatggaccgactaaatcagaccctcgatgccttacgcggtactattcctccttcgtgaatatggagagagatttggcaagcggactcataggaccactcctcatctgttacaaggaatctgtagaccagaggggtaaccagattatgagtgataaacgcaatgtgatcctttttagcgtcttcgacgagaaccggtcctggtacttgaccgagaatatacaaaggttccttcccaaccccgcaggcgttcagttggaagaccctgagtttcaggccagcaatattatgcactcaatcaacggctatgtgtttgatagtctccagctttctgtttgcctccatgaagtagcctattggtacatcttgtcaattggtgctcaaacagacttcctctccgtcttcttctccggctacacctttaagcacaagatggtgtatgaggacactctcacactctttccattttctggagaaaccgtgttcatgagcatggagaatccaggcctttggatcttgggttgccacaacagtgattttcgcaatcggggaatgactgctctcctcaaagtcagcagctgtgataagaacacaggcgactattacgaagattcttacgaggacataagtgcctacttgttgtccaagaataacgccattgagcccagatcattctcccagaatcctcccgtgcttaaaaggcatcagcgcgaaatcaccagaactactcttcagtctgatcaagaggagattgactatgacgacaccataagcgtggaaatgaagaaggaggatttcgatatctatgacgaagatgagaaccagtctccgcggagctttcagaagaagacgcgacactacttcattgcagcagtcgaaaggctttgggactacggtatgtcatcatcccctcatgtgttgcgcaatagagctcagagtggaagtgttccacagttcaagaaagtcgtctttcaagagtttacagatggcagcttcacacagcctctctatcggggcgagcttaacgaacatttgggactccttggtccctatatccgagccgaagtggaggacaacattatggttacctttaggaatcaagcctctcgcccctacagcttctactcctccctcatcagttatgaggaggatcagagacaaggcgctgaaccacggaagaactttgtgaaaccgaatgagacgaagacctacttctggaaagtacagcaccacatggcccccacaaaagacgaattcgattgcaaagcatgggcgtatttttcagacgttgacttggagaaagatgtacattcaggacttattggtcctttgttggtgtgtcacactaacactctcaatccagcccatggcaggcaggtgacagtccaggaattcgctcttttctttaccatctttgatgagaccaagtcctggtacttcacggaaaacatggagcgcaattgcagagccccctgtaacatacagatggaggaccctacctttaaggaaaattatcggttccacgcaatcaacggatacattatggatacactccctggccttgtgatggctcaggaccaacgaatcaggtggtacctcctcagcatgggttctaatgagaacatacactccattcacttttcaggacatgtgttcactgtccggaagaaagaagagtataagatggccctctacaatttgtatccaggcgtgtttgagaccgttgaaatgcttccctctaaagctggcatctggagagtagagtgcttgatcggagaacatcttcacgcaggtatgagcaccttgttcctcgtgtacagcaacaaatgtcagaccccacttggcatggccagtggacacattcgcgactttcagatcacagcatctggccagtatggacaatgggccccaaagttggctcgcctccattactccggtagcataaatgcgtggtccactaaagaacctttcagctggattaaggtcgatcttcttgcccccatgatcatccacggcattaagacacagggagcgaggcagaaattctcctccctctacatctcacagttcattattatgtatagtttggacggcaagaagtggcaaacttatagaggtaacagtactggaacactcatggtgttcttcggcaacgttgatagctctggcatcaaacacaacatctttaatcctcccataatagctcggtacatcagattgcatccgacccactacagcattaggagtacactccgaatggagcttatgggttgcgacttgaattcctgttcaatgccactcggaatggagtctaaagccatctctgatgcacagataaccgccagtagctactttacgaacatgtttgctacgtggtcaccctctaaggcaaggcttcatttgcaaggccggtctaatgcctggagacctcaggtgaacaacccgaaagaatggctccaggtggactttcagaagaccatgaaagtaacaggtgtcactactcagggagttaagtccttgctcaccagcatgtatgtgaaggagttccttatttcctcatcacaagatggccaccagtggaccctcttctttcagaatggtaaggtcaaagtgtttcagggcaatcaagacagcttcacacccgtggtgaacagtcttgatcctccactcttgacacgataccttcgaatccatccacagtcttgggttcaccagattgcattgcgcatggaagtacttggatgcgaggctcaggacctctac

SEQ ID NO: 2790 - protein, 1457 aa, synthetic construct
  REGION 1..1457: note = Variant of human B-domain deleted Factor VIII
MQIELSTCFFLCLLRFCFSATRRYYLGAVELSWDYMQSDLGELPVDARFPPRVPKSFPFNTSVVYKKTLFVEFTDHLFNIAKPRPPWMGLLGPTIQAEVYDTVVITLKNMASHPVSLHAVGVSYWKASEGAEYDDQTSQREKEDDKVFPGGSHTYVWQVLKENGPMASDPLCLTYSYLSHVDLVKDLNSGLIGALLVCREGSLAKEKTQTLHKFILLFAVFDEGKSWHSETKNSLMQDRDAASARAWPKMHTVNGYVNRSLPGLIGCHRKSVYWHVIGMGTTPEVHSIFLEGHTFLVRNHRQASLEISPITFLTAQTTLMDLGQFLLFCHISSHQHDGMEAYVKVDSCPEEPQLRMKNNEEAEDYDDDLTDSEMDVVRFDDDNSPSFIQIRSVAKKHPKTWVHYIAAEEEDWDYAPLVLAPDDRSYKSQYLNNGPQRIGRKYKKVRFMAYTDETFKTREAIQHESGILGPLLYGEVGDTLLIIFKNQASRPYNIYPHGITDVRPLYSRRLPKGVKHLKDFPILPGEIFKYKWTVTVEDGPTKSDPRCLTRYYSSFVNMERDLASGLIGPLLICYKESVDQRGNQIMSDKRNVILFSVFDENRSWYLTENIQRFLPNPAGVQLEDPEFQASNIMHSINGYVFDSLQLSVCLHEVAYWYILSIGAQTDFLSVFFSGYTFKHKMVYEDTLTLFPFSGETVFMSMENPGLWILGCHNSDFRNRGMTALLKVSSCDKNTGDYYEDSYEDISAYLLSKNNAIEPRSFSQNPPVLKRHQREITRTTLQSDQEEIDYDDTISVEMKKEDFDIYDEDENQSPRSFQKKTRHYFIAAVERLWDYGMSSSPHVLRNRAQSGSVPQFKKVVFQEFTDGSFTQPLYRGELNEHLGLLGPYIRAEVEDNIMVTFRNQASRPYSFYSSLISYEEDQRQGAEPRKNFVKPNETKTYFWKVQHHMAPTKDEFDCKAWAYFSDVDLEKDVHSGLIGPLLVCHTNTLNPAHGRQVTVQEFALFFTIFDETKSWYFTENMERNCRAPCNIQMEDPTFKENYRFHAINGYIMDTLPGLVMAQDQRIRWYLLSMGSNENIHSIHFSGHVFTVRKKEEYKMALYNLYPGVFETVEMLPSKAGIWRVECLIGEHLHAGMSTLFLVYSNKCQTPLGMASGHIRDFQITASGQYGQWAPKLARLHYSGSINAWSTKEPFSWIKVDLLAPMIIHGIKTQGARQKFSSLYISQFIIMYSLDGKKWQTYRGNSTGTLMVFFGNVDSSGIKHNIFNPPIIARYIRLHPTHYSIRSTLRMELMGCDLNSCSMPLGMESKAISDAQITASSYFTNMFATWSPSKARLHLQGRSNAWRPQVNNPKEWLQVDFQKTMKVTGVTTQGVKSLLTSMYVKEFLISSSQDGHQWTLFFQNGKVKVFQGNQDSFTPVVNSLDPPLLTRYLRIHPQSWVHQIALRMEVLGCEAQDLY

SEQ ID NO: 2791 - DNA, 4371 bp, synthetic construct
  misc_feature 1..4371: note = Variant of human B-domain deleted Factor VIII
  source 1..4371: mol_type = other DNA
atgcagattgaactgtctacctgcttcttcctctgtttgctgaggttctgctttagcgccactagacggtactaccttggcgctgtggagctgtcctgggactatatgcagagtgatttgggagagcttcccgtcgacgcacgatttcctcctcgcgttccaaagtcatttcccttcaacacaagcgtggtgtacaagaagacgctcttcgtcgaattcaccgatcacctgttcaatatcgccaaacccagaccaccatggatgggtcttttggggcctaccatacaagcggaggtgtatgacacagttgttatcactctcaagaacatggcttctcatccggtaagtcttcacgcagtgggcgtgtcctactggaaagcttcagaaggagccgagtatgatgatcagacatcccagagggagaaagaagacgacaaggtatttccaggtgggtctcatacctatgtgtggcaagtgctcaaagagaatggccctatggcaagcgatccgtattgtttgacttacagctacctttcacacgttgacctcgtcaaggacctcaactccgggttgattggagccttgttggtatgcagggaaggatctcttgccaaagagaagacacagaccctccacaagtttatccttctctttgctgtgttcgatgagggcaaaagttggcatagcgaaacgaagaattccctcatgcaggatcgcgacgcagccagcgccagagcttggcccaagatgcacactgtgaacggatatgtcaataggtcacttcctggcttgattgggtgtcatcggaaaagtgtctactggcacgtgatcggaatggggacaacaccagaggtccactccatatttctcgaaggccataccttccttgttcgaaaccacagacaggcatccttggagatctctcccattacctttctcactgcccaaacgctccttatggacttgggtcagttccttctcttctgccatatcagctcacaccagcatgatggtatggaagcttatgtgaaagtcgacagttgtcctgaggagccacagttgcgcatgaagaataatgaagaagccgaggattacgacgacgatctcaccgattctgagatggacgtggtgaggtttgatgacgacaactctccctccttcattcaaatccggagcgtggcgaagaaacaccccaagacttgggtccactatatagcggcggaagaggaggattgggattacgctcctcttgtattggcaccagatgaccgctcatacaaaagccagtacctcaacaacggaccgcagagaattggccggaagtataagaaagtgcgatttatggcctatacagacgaaacctttaagacaagggaggccatccagcatgagagtgggattttgggacctcttctttacggcgaagttggtgataccctcctcatcatcttcaagaatcaagcttctcgcccctataacatttacccacacgggatcactgacgttaggcctttgtatagcagaagacttcccaaaggcgtgaagcatctcaaagacttccccattttgccaggcgagatctttaagtacaaatggaccgtcacagtggaagatggaccgactaaatcagaccctcgatgccttacgcggtactattcctccttcgtgaatatggagagagatttggcaagcggactcataggaccactcctcatctgttacaaggaatctgtagaccagaggggtaaccagattatgagtgataaacgcaatgtgatcctttttagcgtcttcgacgagaaccggtcctggtacttgaccgagaatatacaaaggttccttcccaaccccgcaggcgttcagttggaagaccctgagtttcaggccagcaatattatgcactcaatcaacggctatgtgtttgatagtctccagctttctgtttgcctccatgaagtagcctattggtacatcttgtcaattggtgctcaaacagacttcctctccgtcttcttctccggctacacctttaagcacaagatggtgtatgaggacactctcacactctttccattttctggagaaaccgtgttcatgagcatggagaatccaggcctttggatcttgggttgccacaacagtgattttcgcaatcggggaatgactgctctcctcaaagtcagcagctgtgataagaacacaggcgactattacgaagattcttacgaggacataagtgcctacttgttgtccaagaataacgccattgagcccagatcattctcccagaatcctcccgtgcttaaaaggcatcagcgcgaaatcaccagaactactcttcagtctgatcaagaggagattgactatgacgacaccataagcgtggaaatgaagaaggaggatttcgatatctatgacgaagatgagaaccagtctccgcggagctttcagaagaagacgcgacactacttcattgcagcagtcgaaaggctttgggactacggtatgtcatcatcccctcatgtgttgcgcaatagagctcagagtggaagtgttccacagttcaagaaagtcgtctttcaagagtttacagatggcagcttcacacagcctctctatcggggcgagcttaacgaacatttgggactccttggtccctatatccgagccgaagtggaggacaacattatggttacctttaggaatcaagcctctcgcccctacagcttctactcctccctcatcagttatgaggaggatcagagacaaggcgctgaaccacggaagaactttgtgaaaccgaatgagacgaagacctacttctggaaagtacagcaccacatggcccccacaaaagacgaattcgattgcaaagcatgggcgtatttttcagacgttgacttggagaaagatgtacattcaggacttattggtcctttgttggtgtgtcacactaacactctcaatccagcccatggcaggcaggtgacagtccaggaattcgctcttttctttaccatctttgatgagaccaagtcctggtacttcacggaaaacatggagcgcaattgcagagccccctgtaacatacagatggaggaccctacctttaaggaaaattatcggttccacgcaatcaacggatacattatggatacactccctggccttgtgatggctcaggaccaacgaatcaggtggtacctcctcagcatgggttctaatgagaacatacactccattcacttttcaggacatgtgttcactgtccggaagaaagaagagtataagatggccctctacaatttgtatccaggcgtgtttgagaccgttgaaatgcttccctctaaagctggcatctggagagtagagtgcttgatcggagaacatcttcacgcaggtatgagcaccttgttcctcgtgtacagcaacaaatgtcagaccccacttggcatggccagtggacacattcgcgactttcagatcacagcatctggccagtatggacaatgggccccaaagttggctcgcctccattactccggtagcataaatgcgtggtccactaaagaacctttcagctggattaaggtcgatcttcttgcccccatgatcatccacggcattaagacacagggagcgaggcagaaattctcctccctctacatctcacagttcattattatgtatagtttggacggcaagaagtggcaaacttatagaggtaacagtactggaacactcatggtgttcttcggcaacgttgatagctctggcatcaaacacaacatctttaatcctcccataatagctcggtacatcagattgcatccgacccactacagcattaggagtacactccgaatggagcttatgggttgcgacttgaattcctgttcaatgccactcggaatggagtctaaagccatctctgatgcacagataaccgccagtagctactttacgaacatgtttgctacgtggtcaccctctaaggcaaggcttcatttgcaaggccggtctaatgcctggagacctcaggtgaacaacccgaaagaatggctccaggtggactttcagaagaccatgaaagtaacaggtgtcactactcagggagttaagtccttgctcaccagcatgtatgtgaaggagttccttatttcctcatcacaagatggccaccagtggaccctcttctttcagaatggtaaggtcaaagtgtttcagggcaatcaagacagcttcacacccgtggtgaacagtcttgatcctccactcttgacacgataccttcgaatccatccacagtcttgggttcaccagattgcattgcgcatggaagtacttggatgcgaggctcaggacctctac

SEQ ID NO: 2792 - protein, 1457 aa, synthetic construct
  REGION 1..1457: note = Variant of human B-domain deleted Factor VIII
MQIELSTCFFLCLLRFCFSATRRYYLGAVELSWDYMQSDLGELPVDARFPPRVPKSFPFNTSVVYKKTLFVEFTDHLFNIAKPRPPWMGLLGPTIQAEVYDTVVITLKNMASHPVSLHAVGVSYWKASEGAEYDDQTSQREKEDDKVFPGGSHTYVWQVLKENGPMASDPYCLTYSYLSHVDLVKDLNSGLIGALLVCREGSLAKEKTQTLHKFILLFAVFDEGKSWHSETKNSLMQDRDAASARAWPKMHTVNGYVNRSLPGLIGCHRKSVYWHVIGMGTTPEVHSIFLEGHTFLVRNHRQASLEISPITFLTAQTLLMDLGQFLLFCHISSHQHDGMEAYVKVDSCPEEPQLRMKNNEEAEDYDDDLTDSEMDVVRFDDDNSPSFIQIRSVAKKHPKTWVHYIAAEEEDWDYAPLVLAPDDRSYKSQYLNNGPQRIGRKYKKVRFMAYTDETFKTREAIQHESGILGPLLYGEVGDTLLIIFKNQASRPYNIYPHGITDVRPLYSRRLPKGVKHLKDFPILPGEIFKYKWTVTVEDGPTKSDPRCLTRYYSSFVNMERDLASGLIGPLLICYKESVDQRGNQIMSDKRNVILFSVFDENRSWYLTENIQRFLPNPAGVQLEDPEFQASNIMHSINGYVFDSLQLSVCLHEVAYWYILSIGAQTDFLSVFFSGYTFKHKMVYEDTLTLFPFSGETVFMSMENPGLWILGCHNSDFRNRGMTALLKVSSCDKNTGDYYEDSYEDISAYLLSKNNAIEPRSFSQNPPVLKRHQREITRTTLQSDQEEIDYDDTISVEMKKEDFDIYDEDENQSPRSFQKKTRHYFIAAVERLWDYGMSSSPHVLRNRAQSGSVPQFKKVVFQEFTDGSFTQPLYRGELNEHLGLLGPYIRAEVEDNIMVTFRNQASRPYSFYSSLISYEEDQRQGAEPRKNFVKPNETKTYFWKVQHHMAPTKDEFDCKAWAYFSDVDLEKDVHSGLIGPLLVCHTNTLNPAHGRQVTVQEFALFFTIFDETKSWYFTENMERNCRAPCNIQMEDPTFKENYRFHAINGYIMDTLPGLVMAQDQRIRWYLLSMGSNENIHSIHFSGHVFTVRKKEEYKMALYNLYPGVFETVEMLPSKAGIWRVECLIGEHLHAGMSTLFLVYSNKCQTPLGMASGHIRDFQITASGQYGQWAPKLARLHYSGSINAWSTKEPFSWIKVDLLAPMIIHGIKTQGARQKFSSLYISQFIIMYSLDGKKWQTYRGNSTGTLMVFFGNVDSSGIKHNIFNPPIIARYIRLHPTHYSIRSTLRMELMGCDLNSCSMPLGMESKAISDAQITASSYFTNMFATWSPSKARLHLQGRSNAWRPQVNNPKEWLQVDFQKTMKVTGVTTQGVKSLLTSMYVKEFLISSSQDGHQWTLFFQNGKVKVFQGNQDSFTPVVNSLDPPLLTRYLRIHPQSWVHQIALRMEVLGCEAQDLY

SEQ ID NO: 2793 - DNA, 4371 bp, synthetic construct
  misc_feature 1..4371: note = Variant of human B-domain deleted Factor VIII
  source 1..4371: mol_type = other DNA
atgcagattgaactgtctacctgcttcttcctctgtttgctgaggttctgctttagcgccactagacggtactaccttggcgctgtggagctgtcctgggactatatgcagagtgatttgggagagcttcccgtcgacgcacgatttcctcctcgcgttccaaagtcatttcccttcaacacaagcgtggtgtacaagaagacgctcttcgtcgaattcaccgatcacctgttcaatatcgccaaacccagaccaccatggatgggtcttttggggcctaccatacaagcggaggtgtatgacacagttgttatcactctcaagaacatggcttctcatccggtaagtcttcacgcagtgggcgtgtcctactggaaagcttcagaaggagccgagtatgatgatcagacatcccagagggagaaagaagacgacaaggtatttccaggtgggtctcatacctatgtgtggcaagtgctcaaagagaatggccctatggcaagcgatccgctctgtttgacttacagctacctttcacacgttgacctcgtcaaggacctcaactccgggttgattggagccttgttggtatgcagggaaggatctcttgccaaagagaagacacagaccctccacaagtttatccttctctttgctgtgttcgatgagggcaaaagttggcatagcgaaacgaagaattccctcatgcaggatcgcgacgcagccagcgccagagcttggcccaagatgcacactgtgaacggatatgtcaataggtcacttcctggcttgattgggtgtcatcggaaaagtgtctactggcacgtgatcggaatggggacaacaccagaggtccactccatatttctcgaaggccataccttccttgttcgaaaccacagacaggcatccttggagatctctcccattacctttctcactgcccaaacgctccttatggacttgggtcagttccttctcttctgccatatcagctcacaccagcatgatggtatggaagcttatgtgaaagtcgacagttgtcctgaggagccacagttgcgcatgaagaataatgaagaagccgaggattacgacgacgatctcaccgattctgagatggacgtggtgaggtttgatgacgacaactctccctccttcattcaaatccggagcgtggcgaagaaacaccccaagacttgggtccactatatagcggcggaagaggaggattgggattacgctcctcttgtattggcaccagatgaccgctcatacaaaagccagtacctcaacaacggaccgcagagaattggccggaagtataagaaagtgcgatttatggcctatacagacgaaacctttaagacaagggaggccatccagcatgagagtgggattttgggacctcttctttacggcgaagttggtgataccctcctcatcatcttcaagaatcaagcttctcgcccctataacatttacccacacgggatcactgacgttaggcctttgtatagcagaagacttcccaaaggcgtgaagcatctcaaagacttccccattttgccaggcgagatctttaagtacaaatggaccgtcacagtggaagatggaccgactaaatcagaccctcgatgccttacgcggtactattcctccttcgtgaattgggagagagatttggcaagcggactcataggaccactcctcatctgttacaaggaatctgtagaccagaggggtaaccagattatgagtgataaacgcaatgtgatcctttttagcgtcttcgacgagaaccggtcctggtacttgaccgagaatatacaaaggttccttcccaaccccgcaggcgttcagttggaagaccctgagtttcaggccagcaatattatgcactcaatcaacggctatgtgtttgatagtctccagctttctgtttgcctccatgaagtagcctattggtacatcttgtcaattggtgctcaaacagacttcctctccgtcttcttctccggctacacctttaagcacaagatggtgtatgaggacactctcacactctttccattttctggagaaaccgtgttcatgagcatggagaatccaggcctttggatcttgggttgccacaacagtgattttcgcaatcggggaatgactgctctcctcaaagtcagcagctgtgataagaacacaggcgactattacgaagattcttacgaggacataagtgcctacttgttgtccaagaataacgccattgagcccagatcattctcccagaatcctcccgtgcttaaaaggcatcagcgcgaaatcaccagaactactcttcagtctgatcaagaggagattgactatgacgacaccataagcgtggaaatgaagaaggaggatttcgatatctatgacgaagatgagaaccagtctccgcggagctttcagaagaagacgcgacactacttcattgcagcagtcgaaaggctttgggactacggtatgtcatcatcccctcatgtgttgcgcaatagagctcagagtggaagtgttccacagttcaagaaagtcgtctttcaagagtttacagatggcagcttcacacagcctctctatcggggcgagcttaacgaacatttgggactccttggtccctatatccgagccgaagtggaggacaacattatggttacctttaggaatcaagcctctcgcccctacagcttctactcctccctcatcagttatgaggaggatcagagacaaggcgctgaaccacggaagaactttgtgaaaccgaatgagacgaagacctacttctggaaagtacagcaccacatggcccccacaaaagacgaattcgattgcaaagcatgggcgtatttttcagacgttgacttggagaaagatgtacattcaggacttattggtcctttgttggtgtgtcacactaacactctcaatccagcccatggcaggcaggtgacagtccaggaattcgctcttttctttaccatctttgatgagaccaagtcctggtacttcacggaaaacatggagcgcaattgcagagccccctgtaacatacagatggaggaccctacctttaaggaaaattatcggttccacgcaatcaacggatacattatggatacactccctggccttgtgatggctcaggaccaacgaatcaggtggtacctcctcagcatgggttctaatgagaacatacactccattcacttttcaggacatgtgttcactgtccggaagaaagaagagtataagatggccctctacaatttgtatccaggcgtgtttgagaccgttgaaatgcttccctctaaagctggcatctggagagtagagtgcttgatcggagaacatcttcacgcaggtatgagcaccttgttcctcgtgtacagcaacaaatgtcagaccccacttggcatggccagtggacacattcgcgactttcagatcacagcatctggccagtatggacaatgggccccaaagttggctcgcctccattactccggtagcataaatgcgtggtccactaaagaacctttcagctggattaaggtcgatcttcttgcccccatgatcatccacggcattaagacacagggagcgaggcagaaattctcctccctctacatctcacagttcattattatgtatagtttggacggcaagaagtggcaaacttatagaggtaacagtactggaacactcatggtgttcttcggcaacgttgatagctctggcatcaaacacaacatctttaatcctcccataatagctcggtacatcagattgcatccgacccactacagcattaggagtacactccgaatggagcttatgggttgcgacttgaattcctgttcaatgccactcggaatggagtctaaagccatctctgatgcacagataaccgccagtagctactttacgaacatgtttgctacgtggtcaccctctaaggcaaggcttcatttgcaaggccggtctaatgcctggagacctcaggtgaacaacccgaaagaatggctccaggtggactttcagaagaccatgaaagtaacaggtgtcactactcagggagttaagtccttgctcaccagcatgtatgtgaaggagttccttatttcctcatcacaagatggccaccagtggaccctcttctttcagaatggtaaggtcaaagtgtttcagggcaatcaagacagcttcacacccgtggtgaacagtcttgatcctccactcttgacacgataccttcgaatccatccacagtcttgggttcaccagattgcattgcgcatggaagtacttggatgcgaggctcaggacctctac

SEQ ID NO: 2794 - protein, 1457 aa, synthetic construct
  REGION 1..1457: note = Variant of human B-domain deleted Factor VIII
MQIELSTCFFLCLLRFCFSATRRYYLGAVELSWDYMQSDLGELPVDARFPPRVPKSFPFNTSVVYKKTLFVEFTDHLFNIAKPRPPWMGLLGPTIQAEVYDTVVITLKNMASHPVSLHAVGVSYWKASEGAEYDDQTSQREKEDDKVFPGGSHTYVWQVLKENGPMASDPLCLTYSYLSHVDLVKDLNSGLIGALLVCREGSLAKEKTQTLHKFILLFAVFDEGKSWHSETKNSLMQDRDAASARAWPKMHTVNGYVNRSLPGLIGCHRKSVYWHVIGMGTTPEVHSIFLEGHTFLVRNHRQASLEISPITFLTAQTLLMDLGQFLLFCHISSHQHDGMEAYVKVDSCPEEPQLRMKNNEEAEDYDDDLTDSEMDVVRFDDDNSPSFIQIRSVAKKHPKTWVHYIAAEEEDWDYAPLVLAPDDRSYKSQYLNNGPQRIGRKYKKVRFMAYTDETFKTREAIQHESGILGPLLYGEVGDTLLIIFKNQASRPYNIYPHGITDVRPLYSRRLPKGVKHLKDFPILPGEIFKYKWTVTVEDGPTKSDPRCLTRYYSSFVNWERDLASGLIGPLLICYKESVDQRGNQIMSDKRNVILFSVFDENRSWYLTENIQRFLPNPAGVQLEDPEFQASNIMHSINGYVFDSLQLSVCLHEVAYWYILSIGAQTDFLSVFFSGYTFKHKMVYEDTLTLFPFSGETVFMSMENPGLWILGCHNSDFRNRGMTALLKVSSCDKNTGDYYEDSYEDISAYLLSKNNAIEPRSFSQNPPVLKRHQREITRTTLQSDQEEIDYDDTISVEMKKEDFDIYDEDENQSPRSFQKKTRHYFIAAVERLWDYGMSSSPHVLRNRAQSGSVPQFKKVVFQEFTDGSFTQPLYRGELNEHLGLLGPYIRAEVEDNIMVTFRNQASRPYSFYSSLISYEEDQRQGAEPRKNFVKPNETKTYFWKVQHHMAPTKDEFDCKAWAYFSDVDLEKDVHSGLIGPLLVCHTNTLNPAHGRQVTVQEFALFFTIFDETKSWYFTENMERNCRAPCNIQMEDPTFKENYRFHAINGYIMDTLPGLVMAQDQRIRWYLLSMGSNENIHSIHFSGHVFTVRKKEEYKMALYNLYPGVFETVEMLPSKAGIWRVECLIGEHLHAGMSTLFLVYSNKCQTPLGMASGHIRDFQITASGQYGQWAPKLARLHYSGSINAWSTKEPFSWIKVDLLAPMIIHGIKTQGARQKFSSLYISQFIIMYSLDGKKWQTYRGNSTGTLMVFFGNVDSSGIKHNIFNPPIIARYIRLHPTHYSIRSTLRMELMGCDLNSCSMPLGMESKAISDAQITASSYFTNMFATWSPSKARLHLQGRSNAWRPQVNNPKEWLQVDFQKTMKVTGVTTQGVKSLLTSMYVKEFLISSSQDGHQWTLFFQNGKVKVFQGNQDSFTPVVNSLDPPLLTRYLRIHPQSWVHQIALRMEVLGCEAQDLY

SEQ ID NO: 2795 - DNA, 4371 bp, synthetic construct
  misc_feature 1..4371: note = Variant of human B-domain deleted Factor VIII
  source 1..4371: mol_type = other DNA
atgcagattgaactgtctacctgcttcttcctctgtttgctgaggttctgctttagcgccactagacggtactaccttggcgctgtggagctgtcctgggactatatgcagagtgatttgggagagcttcccgtcgacgcacgatttcctcctcgcgttccaaagtcatttcccttcaacacaagcgtggtgtacaagaagacgctcttcgtcgaattcaccgatcacctgttcaatatcgccaaacccagaccaccatggatgggtcttttggggcctaccatacaagcggaggtgtatgacacagttgttatcactctcaagaacatggcttctcatccggtaagtcttcacgcagtgggcgtgtcctactggaaagcttcagaaggagccgagtatgatgatcagacatcccagagggagaaagaagacgacaaggtatttccaggtgggtctcatacctatgtgtggcaagtgctcaaagagaatggccctatggcaagcgatccgctctgtttgacttacagctacctttcacacgttgacctcgtcaaggacctcaactccgggttgattggagccttgttggtatgcagggaaggatctcttgccaaagagaagacacagaccctccacaagtttatccttctctttgctgtgttcgatgagggcaaaagttggcatagcgaaacgaagaattccctcatgcaggatcgcgacgcagccagcgccagagcttggcccaagatgcacactgtgaacggatatgtcaataggtcacttcctggcttgattgggtgtcatcggaaaagtgtctactggcacgtgatcggaatggggacaacaccagaggtccactccatatttctcgaaggccataccttccttgttcgaaaccacagacaggcatccttggagatctctcccattacctttctcactgcccaaacgctccttatggacttgggtcagttccttctcttctgccatatcagctcacaccagcatgatggtatggaagcttatgtgaaagtcgacagttgtcctgaggagccacagttgcgcatgaagaataatgaagaagccgaggattacgacgacgatctcaccgattctgagatggacgtggtgaggtttgatgacgacaactctccctccttcattcaaatccggagcgtggcgaagaaacaccccaagacttgggtccactatatagcggcggaagaggaggattgggattacgctcctcttgtattggcaccagatgaccgctcatacaaaagccagtacctcaacaacggaccgcagagaattggccggaagtataagaaagtgcgatttatggcctatacagacgaaacctttaagacaagggaggccatccagcatgagagtgggattttgggacctcttctttacggcgaagttggtgataccctcctcatcatcttcaagaatcaagcttctcgcccctataacatttacccacacgggatcactgacgttaggcctttgtatagcagaagacttcccaaaggcgtgaagcatctcaaagacttccccattttgccaggcgagatctttaagtacaaatggaccgtcacagtggaagatggaccgactaaatcagaccctcgatgccttacgcggtactattcctccttcgtgaatatggagagagatttggcaagcggactaataggaccactcctcatctgttacaaggaatctgtagaccagaggggtaaccagattatgagtgataaacgcaatgtgatcctttttagcgtcttcgacgagaaccggtcctggtacttgaccgagaatatacaaaggttccttcccaaccccgcaggcgttcagttggaagaccctgagtttcaggccagcaatattatgcactcaatcaacggctatgtgtttgatagtctccagctttctgtttgcctccatgaagtagcctattggtacatcttgtcaattggtgctcaaacagacttcctctccgtcttcttctccggctacacctttaagcacaagatggtgtatgaggacactctcacactctttccattttctggagaaaccgtgttcatgagcatggagaatccaggcctttggatcttgggttgccacaacagtgattttcgcaatcggggaatgactgctctcctcaaagtcagcagctgtgataagaacacaggcgactattacgaagattcttacgaggacataagtgcctacttgttgtccaagaataacgccattgagcccagatcattctcccagaatcctcccgtgcttaaaaggcatcagcgcgaaatcaccagaactactcttcagtctgatcaagaggagattgactatgacgacaccataagcgtggaaatgaagaaggaggatttcgatatccaggacgaagatgagaaccagtctccgcggagctttcagaagaagacgcgacactacttcattgcagcagtcgaaaggctttgggactacggtatgtcatcatcccctcatgtgttgcgcaatagagctcagagtggaagtgttccacagttcaagaaagtcgtctttcaagagtttacagatggcagcttcacacagcctctctatcggggcgagcttaacgaacatttgggactccttggtccctatatccgagccgaagtggaggacaacattatggttacctttaggaatcaagcctctcgcccctacagcttctactcctccctcatcagttatgaggaggatcagagacaaggcgctgaaccacggaagaactttgtgaaaccgaatgagacgaagacctacttctggaaagtacagcaccacatggcccccacaaaagacgaattcgattgcaaagcatgggcgtatttttcagacgttgacttggagaaagatgtacattcaggacttattggtcctttgttggtgtgtcacactaacactctcaatccagcccatggcaggcaggtgacagtccaggaattcgctcttttctttaccatctttgatgagaccaagtcctggtacttcacggaaaacatggagcgcaattgcagagccccctgtaacatacagatggaggaccctacctttaaggaaaattatcggttccacgcaatcaacggatacattatggatacactccctggccttgtgatggctcaggaccaacgaatcaggtggtacctcctcagcatgggttctaatgagaacatacactccattcacttttcaggacatgtgttcactgtccggaagaaagaagagtataagatggccctctacaatttgtatccaggcgtgtttgagaccgttgaaatgcttccctctaaagctggcatctggagagtagagtgcttgatcggagaacatcttcacgcaggtatgagcaccttgttcctcgtgtacagcaacaaatgtcagaccccacttggcatggccagtggacacattcgcgactttcagatcacagcatctggccagtatggacaatgggccccaaagttggctcgcctccattactccggtagcataaatgcgtggtccactaaagaacctttcagctggattaaggtcgatcttcttgcccccatgatcatccacggcattaagacacagggagcgaggcagaaattctcctccctctacatctcacagttcattattatgtatagtttggacggcaagaagtggcaaacttatagaggtaacagtactggaacactcatggtgttcttcggcaacgttgatagctctggcatcaaacacaacatctttaatcctcccataatagctcggtacatcagattgcatccgacccactacagcattaggagtacactccgaatggagcttatgggttgcgacttgaattcctgttcaatgccactcggaatggagtctaaagccatctctgatgcacagataaccgccagtagctactttacgaacatgtttgctacgtggtcaccctctaaggcaaggcttcatttgcaaggccggtctaatgcctggagacctcaggtgaacaacccgaaagaatggctccaggtggactttcagaagaccatgaaagtaacaggtgtcactactcagggagttaagtccttgctcaccagcatgtatgtgaaggagttccttatttcctcatcacaagatggccaccagtggaccctcttctttcagaatggtaaggtcaaagtgtttcagggcaatcaagacagcttcacacccgtggtgaacagtcttgatcctccactcttgacacgataccttcgaatccatccacagtcttgggttcaccagattgcattgcgcatggaagtacttggatgcgaggctcaggacctctac

SEQ ID NO: 2796 - protein, 1457 aa, synthetic construct
  REGION 1..1457: note = Variant of human B-domain deleted Factor VIII
MQIELSTCFFLCLLRFCFSATRRYYLGAVELSWDYMQSDLGELPVDARFPPRVPKSFPFNTSVVYKKTLFVEFTDHLFNIAKPRPPWMGLLGPTIQAEVYDTVVITLKNMASHPVSLHAVGVSYWKASEGAEYDDQTSQREKEDDKVFPGGSHTYVWQVLKENGPMASDPLCLTYSYLSHVDLVKDLNSGLIGALLVCREGSLAKEKTQTLHKFILLFAVFDEGKSWHSETKNSLMQDRDAASARAWPKMHTVNGYVNRSLPGLIGCHRKSVYWHVIGMGTTPEVHSIFLEGHTFLVRNHRQASLEISPITFLTAQTLLMDLGQFLLFCHISSHQHDGMEAYVKVDSCPEEPQLRMKNNEEAEDYDDDLTDSEMDVVRFDDDNSPSFIQIRSVAKKHPKTWVHYIAAEEEDWDYAPLVLAPDDRSYKSQYLNNGPQRIGRKYKKVRFMAYTDETFKTREAIQHESGILGPLLYGEVGDTLLIIFKNQASRPYNIYPHGITDVRPLYSRRLPKGVKHLKDFPILPGEIFKYKWTVTVEDGPTKSDPRCLTRYYSSFVNMERDLASGLIGPLLICYKESVDQRGNQIMSDKRNVILFSVFDENRSWYLTENIQRFLPNPAGVQLEDPEFQASNIMHSINGYVFDSLQLSVCLHEVAYWYILSIGAQTDFLSVFFSGYTFKHKMVYEDTLTLFPFSGETVFMSMENPGLWILGCHNSDFRNRGMTALLKVSSCDKNTGDYYEDSYEDISAYLLSKNNAIEPRSFSQNPPVLKRHQREITRTTLQSDQEEIDYDDTISVEMKKEDFDIQDEDENQSPRSFQKKTRHYFIAAVERLWDYGMSSSPHVLRNRAQSGSVPQFKKVVFQEFTDGSFTQPLYRGELNEHLGLLGPYIRAEVEDNIMVTFRNQASRPYSFYSSLISYEEDQRQGAEPRKNFVKPNETKTYFWKVQHHMAPTKDEFDCKAWAYFSDVDLEKDVHSGLIGPLLVCHTNTLNPAHGRQVTVQEFALFFTIFDETKSWYFTENMERNCRAPCNIQMEDPTFKENYRFHAINGYIMDTLPGLVMAQDQRIRWYLLSMGSNENIHSIHFSGHVFTVRKKEEYKMALYNLYPGVFETVEMLPSKAGIWRVECLIGEHLHAGMSTLFLVYSNKCQTPLGMASGHIRDFQITASGQYGQWAPKLARLHYSGSINAWSTKEPFSWIKVDLLAPMIIHGIKTQGARQKFSSLYISQFIIMYSLDGKKWQTYRGNSTGTLMVFFGNVDSSGIKHNIFNPPIIARYIRLHPTHYSIRSTLRMELMGCDLNSCSMPLGMESKAISDAQITASSYFTNMFATWSPSKARLHLQGRSNAWRPQVNNPKEWLQVDFQKTMKVTGVTTQGVKSLLTSMYVKEFLISSSQDGHQWTLFFQNGKVKVFQGNQDSFTPVVNSLDPPLLTRYLRIHPQSWVHQIALRMEVLGCEAQDLY

SEQ ID NO: 2797 - DNA, 4371 bp, synthetic construct
  misc_feature 1..4371: note = Variant of human B-domain deleted Factor VIII
  source 1..4371: mol_type = other DNA
atgcagattgaactgtctacctgcttcttcctctgtttgctgaggttctgctttagcgccactagacggtactaccttggcgctgtggagctgtcctgggactatatgcagagtgatttgggagagcttcccgtcgacgcacgatttcctcctcgcgttccaaagtcatttcccttcaacacaagcgtggtgtacaagaagacgctcttcgtcgaattcaccgatcacctgttcaatatcgccaaacccagaccaccatggatgggtcttttggggcctaccatacaagcggaggtgtatgacacagttgttatcactctcaagaacatggcttctcatccggtaagtcttcacgcagtgggcgtgtcctactggaaagcttcagaaggagccgagtatgatgatcagacatcccagagggagaaagaagacgacaaggtatttccaggtgggtctcatacctatgtgtggcaagtgctcaaagagaatggccctatggcaagcgatccgctctgtttgacttacagctacctttcacacgttgacctcgtcaaggacctcaactccgggttgattggagccttgttggtatgcagggaaggatctcttgccaaagagaagacacagaccctccacaagtttatccttctctttgctgtgttcgatgagggcaaaagttggcatagcgaaacgaagaattccctcatgcaggatcgcgacgcagccagcgccagagcttggcccaagatgcacactgtgaacggatatgtcaataggtcacttcctggcttgattgggtgtcatcggaaaagtgtctactggcacgtgatcggaatggggacaacaccagaggtccactccatatttctcgaaggccataccttccttgttcgaaaccacagacaggcatccttggagatctctcccattacctttctcactgcccaaacgctccttatggacttgggtcagttccttctcttctgccatatcagctcacaccagcatgatggtatggaagcttatgtgaaagtcgacagttgtcctgaggagccacagttgcgcatgaagaataatgaagaagccgaggattacgacgacgatctcaccgattctgagatggacgtggtgaggtttgatgacgacaactctccctccttcattcaaatccggagcgtggcgaagaaacaccccaagacttgggtccactatatagcggcggaagaggaggattgggattacgctcctcttgtattggcaccagatgaccgctcatacaaaagccagtacctcaacaacggaccgcagagaattggccggaagtataagaaagtgcgatttatggcctatacagacgaaacctttaagacaagggaggccatccagcatgagagtgggattttgggacctcttctttacggcgaagttggtgataccctcctcatcatcttcaagaatcaagcttctcgcccctataacatttacccacacgggatcactgacgttaggcctttgtatagcagaagacttcccaaaggcgtgaagcatctcaaagacttccccattttgccaggcgagatctttaagtacaaatggaccgtcacagtggaagatggaccgactaaatcagaccctcgatgccttacgcggtactattcctccttcgtgaatgcggagagagatttggcaagcggactcataggaccactcctcatctgttacaaggaatctgtagaccagaggggtaaccagattatgagtgataaacgcaatgtgatcctttttagcgtcttcgacgagaaccggtcctggtacttgaccgagaatatacaaaggttccttcccaaccccgcaggcgttcagttggaagaccctgagtttcaggccagcaatattatgcactcaatcaacggctatgtgtttgatagtctccagctttctgtttgcctccatgaagtagcctattggtacatcttgtcaattggtgctcaaacagacttcctctccgtcttcttctccggctacacctttaagcacaagatggtgtatgaggacactctcacactctttccattttctggagaaaccgtgttcatgagcatggagaatccaggcctttggatcttgggttgccacaacagtgattttcgcaatcggggaatgactgctctcctcaaagtcagcagctgtgataagaacacaggcgactattacgaagattcttacgaggacataagtgcctacttgttgtccaagaataacgccattgagcccagatcattctcccagaatcctcccgtgcttaaaaggcatcagcgcgaaatcaccagaactactcttcagtctgatcaagaggagattgactatgacgacaccataagcgtggaaatgaagaaggaggatttcgatatctatgacgaagatgagaaccagtctccgcggagctttcagaagaagacgcgacactacttcattgcagcagtcgaaaggctttgggactacggtatgtcatcatcccctcatgtgttgcgcaatagagctcagagtggaagtgttccacagttcaagaaagtcgtctttcaagagtttacagatggcagcttcacacagcctctctatcggggcgagcttaacgaacatttgggactccttggtccctatatccgagccgaagtggaggacaacattatggttacctttaggaatcaagcctctcgcccctacagcttctactcctccctcatcagttatgaggaggatcagagacaaggcgctgaaccacggaagaactttgtgaaaccgaatgagacgaagacctacttctggaaagtacagcaccacatggcccccacaaaagacgaattcgattgcaaagcatgggcgtatttttcagacgttgacttggagaaagatgtacattcaggacttattggtcctttgttggtgtgtcacactaacactctcaatccagcccatggcaggcaggtgacagtccaggaattcgctcttttctttaccatctttgatgagaccaagtcctggtacttcacggaaaacatggagcgcaattgcagagccccctgtaacatacagatggaggaccctacctttaaggaaaattatcggttccacgcaatcaacggatacattatggatacactccctggccttgtgatggctcaggaccaacgaatcaggtggtacctcctcagcatgggttctaatgagaacatacactccattcacttttcaggacatgtgttcactgtccggaagaaagaagagtataagatggccctctacaatttgtatccaggcgtgtttgagaccgttgaaatgcttccctctaaagctggcatctggagagtagagtgcttgatcggagaacatcttcacgcaggtatgagcaccttgttcctcgtgtacagcaacaaatgtcagaccccacttggcatggccagtggacacattcgcgactttcagatcacagcatctggccagtatggacaatgggccccaaagttggctcgcctccattactccggtagcataaatgcgtggtccactaaagaacctttcagctggattaaggtcgatcttcttgcccccatgatcatccacggcattaagacacagggagcgaggcagaaattctcctccctctacatctcacagttcattattatgtatagtttggacggcaagaagtggcaaacttatagaggtaacagtactggaacactcatggtgttcttcggcaacgttgatagctctggcatcaaacacaacatctttaatcctcccataatagctcggtacatcagattgcatccgacccactacagcattaggagtacactccgaatggagcttatgggttgcgacttgaattcctgttcaatgccactcggaatggagtctaaagccatctctgatgcacagataaccgccagtagctactttacgaacatgtttgctacgtggtcaccctctaaggcaaggcttcatttgcaaggccggtctaatgcctggagacctcaggtgaacaacccgaaagaatggctccaggtggactttcagaagaccatgaaagtaacaggtgtcactactcagggagttaagtccttgctcaccagcatgtatgtgaaggagttccttatttcctcatcacaagatggccaccagtggaccctcttctttcagaatggtaaggtcaaagtgtttcagggcaatcaagacagcttcacacccgtggtgaacagtcttgatcctccactcttgacacgataccttcgaatccatccacagtcttgggttcaccagattgcattgcgcatggaagtacttggatgcgaggctcaggacctctac

SEQ ID NO: 2798 - protein, 1457 aa, synthetic construct
  REGION 1..1457: note = Variant of human B-domain deleted Factor VIII
MQIELSTCFFLCLLRFCFSATRRYYLGAVELSWDYMQSDLGELPVDARFPPRVPKSFPFNTSVVYKKTLFVEFTDHLFNIAKPRPPWMGLLGPTIQAEVYDTVVITLKNMASHPVSLHAVGVSYWKASEGAEYDDQTSQREKEDDKVFPGGSHTYVWQVLKENGPMASDPLCLTYSYLSHVDLVKDLNSGLIGALLVCREGSLAKEKTQTLHKFILLFAVFDEGKSWHSETKNSLMQDRDAASARAWPKMHTVNGYVNRSLPGLIGCHRKSVYWHVIGMGTTPEVHSIFLEGHTFLVRNHRQASLEISPITFLTAQTLLMDLGQFLLFCHISSHQHDGMEAYVKVDSCPEEPQLRMKNNEEAEDYDDDLTDSEMDVVRFDDDNSPSFIQIRSVAKKHPKTWVHYIAAEEEDWDYAPLVLAPDDRSYKSQYLNNGPQRIGRKYKKVRFMAYTDETFKTREAIQHESGILGPLLYGEVGDTLLIIFKNQASRPYNIYPHGITDVRPLYSRRLPKGVKHLKDFPILPGEIFKYKWTVTVEDGPTKSDPRCLTRYYSSFVNAERDLASGLIGPLLICYKESVDQRGNQIMSDKRNVILFSVFDENRSWYLTENIQRFLPNPAGVQLEDPEFQASNIMHSINGYVFDSLQLSVCLHEVAYWYILSIGAQTDFLSVFFSGYTFKHKMVYEDTLTLFPFSGETVFMSMENPGLWILGCHNSDFRNRGMTALLKVSSCDKNTGDYYEDSYEDISAYLLSKNNAIEPRSFSQNPPVLKRHQREITRTTLQSDQEEIDYDDTISVEMKKEDFDIYDEDENQSPRSFQKKTRHYFIAAVERLWDYGMSSSPHVLRNRAQSGSVPQFKKVVFQEFTDGSFTQPLYRGELNEHLGLLGPYIRAEVEDNIMVTFRNQASRPYSFYSSLISYEEDQRQGAEPRKNFVKPNETKTYFWKVQHHMAPTKDEFDCKAWAYFSDVDLEKDVHSGLIGPLLVCHTNTLNPAHGRQVTVQEFALFFTIFDETKSWYFTENMERNCRAPCNIQMEDPTFKENYRFHAINGYIMDTLPGLVMAQDQRIRWYLLSMGSNENIHSIHFSGHVFTVRKKEEYKMALYNLYPGVFETVEMLPSKAGIWRVECLIGEHLHAGMSTLFLVYSNKCQTPLGMASGHIRDFQITASGQYGQWAPKLARLHYSGSINAWSTKEPFSWIKVDLLAPMIIHGIKTQGARQKFSSLYISQFIIMYSLDGKKWQTYRGNSTGTLMVFFGNVDSSGIKHNIFNPPIIARYIRLHPTHYSIRSTLRMELMGCDLNSCSMPLGMESKAISDAQITASSYFTNMFATWSPSKARLHLQGRSNAWRPQVNNPKEWLQVDFQKTMKVTGVTTQGVKSLLTSMYVKEFLISSSQDGHQWTLFFQNGKVKVFQGNQDSFTPVVNSLDPPLLTRYLRIHPQSWVHQIALRMEVLGCEAQDLY

SEQ ID NO: 2799 - DNA, 4371 bp, synthetic construct
  misc_feature 1..4371: note = Variant of human B-domain deleted Factor VIII
  source 1..4371: mol_type = other DNA
atgcagattgaactgtctacctgcttcttcctctgtttgctgaggttctgctttagcgccactagacggtactaccttggcgctgtggagctgtcctgggactatatgcagagtgatttgggagagcttcccgtcgacgcacgatttcctcctcgcgttccaaagtcatttccattcaacacaagcgtggtgtacaagaagacgctcttcgtcgaattcaccgatcacctgttcaatatcgccaaacccagaccaccatggatgggtcttttggggcctaccatacaagcggaggtgtatgacacagttgttatcactctcaagaacatggcttctcatccggtaagtcttcacgcagtgggcgtgtcctactggaaagcttcagaaggagccgagtatgatgatcagacatcccagagggagaaagaagacgacaaggtatttccaggtgggtctcatacctatgtgtggcaagtgctcaaagagaatggccctatggcaagcgatccgctctgtttgacttacagctacctttcacacgttgacctcgtcaaggacctcaactccgggttgattggagccttgttggtatgcagggaaggatctcttgccaaagagaagacacagaccctccacaagtttatccttctctttgctgtgttcgatgagggcaaaagttggcatagcgaaacgaagaattccctcatgcaggatcgcgacgcagccagcgccagagcttggcccaagatgcacactgtgaacggatatgtcaataggtcacttcctggcttgattgggtgtcatcggaaaagtgtctactggcacgtgatcggaatggggacaacaccagaggtccactccatatttctcgaaggccataccttccttgttcgaaaccacagacaggcatccttggagatctctcccattacctttctcactgcccaaacgctcctttctgacttgggtcagttccttctcttctgccatatcagctcacaccagcatgatggtatggaagcttatgtgaaagtcgacagttgtcctgaggagccacagttgcgcatgaagaataatgaagaagccgaggattacgacgacgatctcaccgattctgagatggacgtggtgaggtttgatgacgacaactctccctccttcattcaaatccggagcgtggcgaagaaacaccccaagacttgggtccactatatagcggcggaagaggaggattgggattacgctcctcttgtattggcaccagatgaccgctcatacaaaagccagtacctcaacaacggaccgcagagaattggccggaagtataagaaagtgcgatttatggcctatacagacgaaacctttaagacaagggaggccatccagcatgagagtgggattttgggacctcttctttacggcgaagttggtgataccctcctcatcatcttcaagaatcaagcttctcgcccctataacatttacccacacgggatcactgacgttaggcctttgtatagcagaagacttcccaaaggcgtgaagcatctcaaagacttcccaattttgccaggcgagatctttaagtacaaatggaccgtcacagtggaagatggaccgactaaatcagaccctcgatgccttacgcggtactattcctccttcgtgaatatggagagagatttggcaagcggactcataggaccactcctcatctgttacaaggaatctgtagaccagaggggtaaccagattatgagtgataaacgcaatgtgatcctttttagcgtcttcgacgagaaccggtcctggtacttgaccgagaatatacaaaggttccttcccaaccccgcaggcgttcagttggaagaccctgagtttcaggccagcaatattatgcactcaatcaacggctatgtgtttgatagtctccagctttctgtttgcctccatgaagtagcctattggtacatcttgtcaattggtgctcaaacagacttcctctccgtcttcttctccggctacacctttaagcacaagatggtgtatgaggacactctcacactctttccattttctggagaaaccgtgttcatgagcatggagaatccaggcctttggatcttgggttgccacaacagtgattttcgcaatcggggaatgactgctctcctcaaagtcagcagctgtgataagaacacaggcgactattacgaagattcttacgaggacataagtgcctacttgttgtccaagaataacgccattgagcccagatcattctcccagaatcctcccgtgcttaaaaggcatcagcgcgaaatcaccagaactactcttcagtctgatcaagaggagattgactatgacgacaccataagcgtggaaatgaagaaggaggatttcgatatctatgacgaagatgagaaccagtctccgcggagctttcagaagaagacgcgacactacttcattgcagcagtcgaaaggctttgggactacggtatgtcatcatcccctcatgtgttgcgcaatagagctcagagtggaagtgttccacagttcaagaaagtcgtctttcaagagtttacagatggcagcttcacacagcctctctatcggggcgagcttaacgaacatttgggactccttggtccctatatccgagccgaagtggaggacaacattatggttacctttaggaatcaagcctctcgcccctacagcttctactcctccctcatcagttatgaggaggatcagagacaaggcgctgaaccacggaagaactttgtgaaaccgaatgagacgaagacctacttctggaaagtacagcaccacatggcccccacaaaagacgaattcgattgcaaagcatgggcgtatttttcagacgttgacttggagaaagatgtacattcaggacttattggtcctttgttggtgtgtcacactaacactctcaatccagcccatggcaggcaggtgacagtccaggaattcgctcttttctttaccatctttgatgagaccaagtcctggtacttcacggaaaacatggagcgcaattgcagagccccctgtaacatacagatggaggaccctacctttaaggaaaattatcggttccacgcaatcaacggatacattatggatacactccctggccttgtgatggctcaggaccaacgaatcaggtggtacctcctcagcatgggttctaatgagaacatacactccattcacttttcaggacatgtgttcactgtccggaagaaagaagagtataagatggccctctacaatttgtatccaggcgtgtttgagaccgttgaaatgcttccctctaaagctggcatctggagagtagagtgcttgatcggagaacatcttcacgcaggtatgagcaccttgttcctcgtgtacagcaacaaatgtcagaccccacttggcatggccagtggacacattcgcgactttcagatcacagcatctggccagtatggacaatgggccccaaagttggctcgcctccattactccggtagcataaatgcgtggtccactaaagaacctttcagctggattaaggtcgatcttcttgcccccatgatcatccacggcattaagacacagggagcgaggcagaaattctcctccctctacatctcacagttcattattatgtatagtttggacggcaagaagtggcaaacttatagaggtaacagtactggaacactcatggtgttcttcggcaacgttgatagctctggcatcaaacacaacatctttaatcctcccataatagctcggtacatcagattgcatccgacccactacagcattaggagtacactccgaatggagcttatgggttgcgacttgaattcctgttcaatgccactcggaatggagtctaaagccatctctgatgcacagataaccgccagtagctactttacgaacatgtttgctacgtggtcaccctctaaggcaaggcttcatttgcaaggccggtctaatgcctggagacctcaggtgaacaacccgaaagaatggctccaggtggactttcagaagaccatgaaagtaacaggtgtcactactcagggagttaagtccttgctcaccagcatgtatgtgaaggagttccttatttcctcatcacaagatggccaccagtggaccctcttctttcagaatggtaaggtcaaagtgtttcagggcaatcaagacagcttcacacccgtggtgaacagtcttgatcctccactcttgacacgataccttcgaatccatccacagtcttgggttcaccagattgcattgcgcatggaagtacttggatgcgaggctcaggacctctac

SEQ ID NO: 2800 - protein, 1457 aa, synthetic construct
  REGION 1..1457: note = Variant of human B-domain deleted Factor VIII
MQIELSTCFFLCLLRFCFSATRRYYLGAVELSWDYMQSDLGELPVDARFPPRVPKSFPFNTSVVYKKTLFVEFTDHLFNIAKPRPPWMGLLGPTIQAEVYDTVVITLKNMASHPVSLHAVGVSYWKASEGAEYDDQTSQREKEDDKVFPGGSHTYVWQVLKENGPMASDPLCLTYSYLSHVDLVKDLNSGLIGALLVCREGSLAKEKTQTLHKFILLFAVFDEGKSWHSETKNSLMQDRDAASARAWPKMHTVNGYVNRSLPGLIGCHRKSVYWHVIGMGTTPEVHSIFLEGHTFLVRNHRQASLEISPITFLTAQTLLSDLGQFLLFCHISSHQHDGMEAYVKVDSCPEEPQLRMKNNEEAEDYDDDLTDSEMDVVRFDDDNSPSFIQIRSVAKKHPKTWVHYIAAEEEDWDYAPLVLAPDDRSYKSQYLNNGPQRIGRKYKKVRFMAYTDETFKTREAIQHESGILGPLLYGEVGDTLLIIFKNQASRPYNIYPHGITDVRPLYSRRLPKGVKHLKDFPILPGEIFKYKWTVTVEDGPTKSDPRCLTRYYSSFVNMERDLASGLIGPLLICYKESVDQRGNQIMSDKRNVILFSVFDENRSWYLTENIQRFLPNPAGVQLEDPEFQASNIMHSINGYVFDSLQLSVCLHEVAYWYILSIGAQTDFLSVFFSGYTFKHKMVYEDTLTLFPFSGETVFMSMENPGLWILGCHNSDFRNRGMTALLKVSSCDKNTGDYYEDSYEDISAYLLSKNNAIEPRSFSQNPPVLKRHQREITRTTLQSDQEEIDYDDTISVEMKKEDFDIYDEDENQSPRSFQKKTRHYFIAAVERLWDYGMSSSPHVLRNRAQSGSVPQFKKVVFQEFTDGSFTQPLYRGELNEHLGLLGPYIRAEVEDNIMVTFRNQASRPYSFYSSLISYEEDQRQGAEPRKNFVKPNETKTYFWKVQHHMAPTKDEFDCKAWAYFSDVDLEKDVHSGLIGPLLVCHTNTLNPAHGRQVTVQEFALFFTIFDETKSWYFTENMERNCRAPCNIQMEDPTFKENYRFHAINGYIMDTLPGLVMAQDQRIRWYLLSMGSNENIHSIHFSGHVFTVRKKEEYKMALYNLYPGVFETVEMLPSKAGIWRVECLIGEHLHAGMSTLFLVYSNKCQTPLGMASGHIRDFQITASGQYGQWAPKLARLHYSGSINAWSTKEPFSWIKVDLLAPMIIHGIKTQGARQKFSSLYISQFIIMYSLDGKKWQTYRGNSTGTLMVFFGNVDSSGIKHNIFNPPIIARYIRLHPTHYSIRSTLRMELMGCDLNSCSMPLGMESKAISDAQITASSYFTNMFATWSPSKARLHLQGRSNAWRPQVNNPKEWLQVDFQKTMKVTGVTTQGVKSLLTSMYVKEFLISSSQDGHQWTLFFQNGKVKVFQGNQDSFTPVVNSLDPPLLTRYLRIHPQSWVHQIALRMEVLGCEAQDLY

SEQ ID NO: 2801 - DNA, 4371 bp, synthetic construct
  misc_feature 1..4371: note = Variant of human B-domain deleted Factor VIII
  source 1..4371: mol_type = other DNA
atgcagattgaactgtctacctgcttcttcctctgtttgctgaggttctgctttagcgccactagacggtactaccttggcgctgtggagctgtcctgggactatatgcagagtgatttgggagagcttcccgtcgacgcacgatttcctcctcgcgttccaaagtcatttcccttcaacacaagcgtggtgtacaagaagacgctcttcgtcgaattcaccgatcacctgttcaatatcgccaaacccagaccaccatggatgggtcttttggggcctaccatacaagcggaggtgtatgacacagttgttatcactctcaagaacatggcttctcatccggtaagtcttcacgcagtgggcgtgtcctactggaaagcttcagaaggagccgagtatgatgatcagacatcccagagggagaaagaagacgacaaggtatttccaggtgggtctcatacctatgtgtggcaagtgctcaaagagaatggccctatggcaagcgatccgctctgtttgacttacagctacctttcacacgttgacctcgtcaaggacctcaactccgggttgattggagccttgttggtatgcagggaaggatctcttgccaaagagaagacacagaccctccacaagtttatccttctctttgctgtgttcgatgagggcaaaagttggcatagcgaaacgaagaattccctcatgcaggatcgcgacgcagccagcgccagagcttggcccaagatgcacactgtgaacggatatgtcaataggtcacttcctggcttgattgggtgtcatcggaaaagtgtctactggcacgtgatcggaatggggacaacaccagaggtccactccatatttctcgaaggccataccttccttgttcgaaaccacagacaggcatccttggagatctctcccattacctttctcactgcccaaacgctccttatggacttgggtcagttccttctcttctgccatatcagctcacaccagcatgatggtatggaagcttatgtgaaagtagacagttgtcctgaggagccacagttgcgcatgaagaataatgaagaagccgaggattacgacgacgatctcaccgattctgagatggacgtggtgaggtttgatgacgacaactctccctccttcattcaaatccggagcgtggcgaagaaacaccccaagacttgggtccactatatagcggcggaagaggaggattgggattacgctcctcttgtattggcaccagatgaccgctcatacaaaagccagtacctcaacaacggaccgcagagaattggccggaagtataagaaagtgcgatttatggcctatacagacgaaacctttaagacaagggaggccatccagcatgagagtgggattttgggacctcttctttacggcgaagttggtgataccctcctcatcatcttcaagaatcaagcttctcgcccctataacatttacccacacgggatcactgacgttaggcctttgtatagcagaagacttcccaaaggcgtgaagcatctcaaagacttccccattttgccaggcgagatctttaagtacaaatggaccgtcacagtggaagatggaccgactaaatcagaccctcgatgccttacgcggtactattcctccttcgtgaatatggagagagatttggcaagcggactcataggaccactcctcatctgttacaaggaatctgtagaccagaggggtaaccagattatgagtgataaacgcaatgtgatcctttttagcgtcttcgacgagaaccggtcctggtacttgaccgagaatatacaaaggttccttcccaaccccgcaggcgttcagttggaagaccctgagtttcaggccagcaatattatgcactcaatcaacggctatgtgtttgatagtctccagctttctgtttgcctccatgaagtagcctattggtacatcttgtcaattggtgctcaaacagacttcctctccgtcttcttctccggctacacctttaagcacaagatggtgtatgaggacactctcacactctttccattttctggagaaaccgtgttcatgagcatggagaatccaggcctttggatcttgggttgccacaacagtgattttcgcaatcggggaatgactgctctcctcaaagtcagcagctgtgataagaacacaggcgactattacgaagattcttacgaggacataagtgcctacttggattccaagaataacgccattgagcccagatcattctcccagaatcctcccgtgcttaaaaggcatcagcgcgaaatcaccagaactactcttcagtctgatcaagaggagattgactatgacgacaccataagcgtggaaatgaagaaggaggatttcgatatctatgacgaagatgagaaccagtctccgcggagctttcagaagaagacgcgacactacttcattgcagcagtcgaaaggctttgggactacggtatgtcatcatcccctcatgtgttgcgcaatagagctcagagtggaagtgttccacagttcaagaaagtcgtctttcaagagtttacagatggcagcttcacacagcctctctatcggggcgagcttaacgaacatttgggactccttggtccctatatccgagccgaagtggaggacaacattatggttacctttaggaatcaagcctctcgcccctacagcttctactcctccctcatcagttatgaggaggatcagagacaaggcgctgaaccacggaagaactttgtgaaaccgaatgagacgaagacctacttctggaaagtacagcaccacatggcccccacaaaagacgaattcgattgcaaagcatgggcgtatttttcagacgttgacttggagaaagatgtacattcaggacttattggtcctttgttggtgtgtcacactaacactctcaatccagcccatggcaggcaggtgacagtccaggaattcgctcttttctttaccatctttgatgagaccaagtcctggtacttcacggaaaacatggagcgcaattgcagagccccctgtaacatacagatggaggaccctacctttaaggaaaattatcggttccacgcaatcaacggatacattatggatacactccctggccttgtgatggctcaggaccaacgaatcaggtggtacctcctcagcatgggttctaatgagaacatacactccattcacttttcaggacatgtgttcactgtccggaagaaagaagagtataagatggccctctacaatttgtatccaggcgtgtttgagaccgttgaaatgcttccctctaaagctggcatctggagagtagagtgcttgatcggagaacatcttcacgcaggtatgagcaccttgttcctcgtgtacagcaacaaatgtcagaccccacttggcatggccagtggacacattcgcgactttcagatcacagcatctggccagtatggacaatgggccccaaagttggctcgcctccattactccggtagcataaatgcgtggtccactaaagaacctttcagctggattaaggtcgatcttcttgcccccatgatcatccacggcattaagacacagggagcgaggcagaaattctcctccctctacatctcacagttcattattatgtatagtttggacggcaagaagtggcaaacttatagaggtaacagtactggaacactcatggtgttcttcggcaacgttgatagctctggcatcaaacacaacatctttaatcctcccataatagctcggtacatcagattgcatccgacccactacagcattaggagtacactccgaatggagcttatgggttgcgacttgaattcctgttcaatgccactcggaatggagtctaaagccatctctgatgcacagataaccgccagtagctactttacgaacatgtttgctacgtggtcaccctctaaggcaaggcttcatttgcaaggccggtctaatgcctggagacctcaggtgaacaacccgaaagaatggctccaggtggactttcagaagaccatgaaagtaacaggtgtcactactcagggagttaagtccttgctcaccagcatgtatgtgaaggagttccttatttcctcatcacaagatggccaccagtggaccctcttctttcagaatggtaaggtcaaagtgtttcagggcaatcaagacagcttcacacccgtggtgaacagtcttgatcctccactcttgacacgataccttcgaatccatccacagtcttgggttcaccagattgcattgcgcatggaagtacttggatgcgaggctcaggacctctac

SEQ ID NO: 2802 - protein, 1457 aa, synthetic construct
  REGION 1..1457: note = Variant of human B-domain deleted Factor VIII
MQIELSTCFFLCLLRFCFSATRRYYLGAVELSWDYMQSDLGELPVDARFPPRVPKSFPFNTSVVYKKTLFVEFTDHLFNIAKPRPPWMGLLGPTIQAEVYDTVVITLKNMASHPVSLHAVGVSYWKASEGAEYDDQTSQREKEDDKVFPGGSHTYVWQVLKENGPMASDPLCLTYSYLSHVDLVKDLNSGLIGALLVCREGSLAKEKTQTLHKFILLFAVFDEGKSWHSETKNSLMQDRDAASARAWPKMHTVNGYVNRSLPGLIGCHRKSVYWHVIGMGTTPEVHSIFLEGHTFLVRNHRQASLEISPITFLTAQTLLMDLGQFLLFCHISSHQHDGMEAYVKVDSCPEEPQLRMKNNEEAEDYDDDLTDSEMDVVRFDDDNSPSFIQIRSVAKKHPKTWVHYIAAEEEDWDYAPLVLAPDDRSYKSQYLNNGPQRIGRKYKKVRFMAYTDETFKTREAIQHESGILGPLLYGEVGDTLLIIFKNQASRPYNIYPHGITDVRPLYSRRLPKGVKHLKDFPILPGEIFKYKWTVTVEDGPTKSDPRCLTRYYSSFVNMERDLASGLIGPLLICYKESVDQRGNQIMSDKRNVILFSVFDENRSWYLTENIQRFLPNPAGVQLEDPEFQASNIMHSINGYVFDSLQLSVCLHEVAYWYILSIGAQTDFLSVFFSGYTFKHKMVYEDTLTLFPFSGETVFMSMENPGLWILGCHNSDFRNRGMTALLKVSSCDKNTGDYYEDSYEDISAYLDSKNNAIEPRSFSQNPPVLKRHQREITRTTLQSDQEEIDYDDTISVEMKKEDFDIYDEDENQSPRSFQKKTRHYFIAAVERLWDYGMSSSPHVLRNRAQSGSVPQFKKVVFQEFTDGSFTQPLYRGELNEHLGLLGPYIRAEVEDNIMVTFRNQASRPYSFYSSLISYEEDQRQGAEPRKNFVKPNETKTYFWKVQHHMAPTKDEFDCKAWAYFSDVDLEKDVHSGLIGPLLVCHTNTLNPAHGRQVTVQEFALFFTIFDETKSWYFTENMERNCRAPCNIQMEDPTFKENYRFHAINGYIMDTLPGLVMAQDQRIRWYLLSMGSNENIHSIHFSGHVFTVRKKEEYKMALYNLYPGVFETVEMLPSKAGIWRVECLIGEHLHAGMSTLFLVYSNKCQTPLGMASGHIRDFQITASGQYGQWAPKLARLHYSGSINAWSTKEPFSWIKVDLLAPMIIHGIKTQGARQKFSSLYISQFIIMYSLDGKKWQTYRGNSTGTLMVFFGNVDSSGIKHNIFNPPIIARYIRLHPTHYSIRSTLRMELMGCDLNSCSMPLGMESKAISDAQITASSYFTNMFATWSPSKARLHLQGRSNAWRPQVNNPKEWLQVDFQKTMKVTGVTTQGVKSLLTSMYVKEFLISSSQDGHQWTLFFQNGKVKVFQGNQDSFTPVVNSLDPPLLTRYLRIHPQSWVHQIALRMEVLGCEAQDLY

SEQ ID NO: 2803 - DNA, 4371 bp, synthetic construct
  misc_feature 1..4371: note = Variant of human B-domain deleted Factor VIII
  source 1..4371: mol_type = other DNA
atgcagattgaactgtctacctgcttcttcctctgtttgctgaggttctgctttagcgccactagacggtactaccttggcgctgtggagctgtcctgggactatatgcagagtgatttgggagagcttcccgtcgacgcacgatttcctcctcgcgttccaaagtcatttcccttcaacacaagcgtggtgtacaagaagacgctcttcgtcgaattcaccgatcacctgttcaatatcgccaaacccagaccaccatggatgggtcttttggggcctaccatacaagcggaggtgtatgacacagttgttatcactctcaagaacatggcttctcatccggtaagtcttcacgcagtgggcgtgtcctactggaaagcttcagaaggagccgagtatgatgatcagacatcccagagggagaaagaagacgacaaggtatttccaggtgggtctcatacctatgtgtggcaagtgctcaaagagaatggccctatggcaagcgatccgctctgtttgacttacagctacctttcacacgttgacctcgtcaaggacctcaactccgggttgattggagccttgttggtatgcagggaaggatctcttgccaaagagaagacacagaccctccacaagtttatccttctctttgctgtgttcgatgagggcaaaagttggcatagcgaaacgaagaattccctcatgcaggatcgcgacgcagccagcgccagagcttggcccaagatgcacactgtgaacggatatgtcaataggtcacttcctggcttgattgggtgtcatcggaaaagtgtctactggcacgtgatcggaatggggacaacaccagaggtccactccatatttctcgaaggccataccttccttgttcgaaaccacagacaggcatccttggagatctctcccattacctttctcactgcccaaacgctccttatggacttgggtcagttccttctcttctgccatatcagctcacaccagcatgatggtatggaagcttatgtgaaagtcgacagttgtcctgaggagccacagttgcgcatgaagaataatgaagaagccgaggattacgacgacgatctcaccgattctgagatggacgtggtgaggtttgatgacgacaactctccctccttcattcaaatccggagcgtggcgaagaaacaccccaagacttgggtccactatatagcggcggaagaggaggattgggattacgctcctcttgtattggcaccagatgaccgctcatacaaaagccagtacctcaacaacggaccgcagagaattggccggaagtataagaaagtgcgatttatggcctatacagacgaaacctttaagacaagggaggccatccagcatgagagtgggattttgggacctcttctttacggcgaagttggtgataccctcctcatcatcttcaagaatcaagcttctcgcccctataacatttacccacacgggatcactgacgttaggcctttgtatagcagaagacttcccaaaggcgtgaagcatctcaaagacttccccattttgccaggcgagatctttaagtacaaatggaccgtcacagtggaagatggaccgactaaatcagaccctcgatgccttacgcggtactattcctccttcgtgaatatggagagagatttggcaagcggactcataggaccactcctcatctgttacaaggaatctgtagaccagaggggtaaccagattatgagtgataaacgcaatgtgatcctttttagcgtcttcgacgagaaccggtcctggtacttgaccgagaatatacaaaggttccttcccaaccccgcaggcgttcagttggaagaccctgagtttcaggccagcaatattatgcactcaatcaacggctatgtgtttgatagtctccagctttctgtttgcctccatgaagtagcctattggtacatcttgtcaattggtgctcaaacagacttcctctccgtcttcttctccggctacacctttaagcacaagatggtgtatgaggacactctcacactctttccattttctggagaaaccgtgttcatgagcatggagaatccaggcctttggatcttgggttgccacaacagtgattttcgcaatcggggaatgactgctctcctcaaagtcagcagctgtgataagaacacaggcgactattacgaagattcttacgaggacataagtgcctacttgttgtccaagaataacgccattgagcccagatcattctcccagaatcctcccgtgcttaaaaggcatcagcgcgaagttaccagaactactcttcagtctgatcaagaggagattgactatgacgacaccataagcgtggaaatgaagaaggaggatttcgatatctatgacgaagatgagaaccagtctccgcggagctttcagaagaagacgcgacactacttcattgcagcagtcgaaaggctttgggactacggtatgtcatcatcccctcatgtgttgcgcaatagagctcagagtggaagtgttccacagttcaagaaagtcgtctttcaagagtttacagatggcagcttcacacagcctctctatcggggcgagcttaacgaacatttgggactccttggtccctatatccgagccgaagtggaggacaacattatggttacctttaggaatcaagcctctcgcccctacagcttctactcctccctcatcagttatgaggaggatcagagacaaggcgctgaaccacggaagaactttgtgaaaccgaatgagacgaagacctacttctggaaagtacagcaccacatggcccccacaaaagacgaattcgattgcaaagcatgggcgtatttttcagacgttgacttggagaaagatgtacattcaggacttattggtcctttgttggtgtgtcacactaacactctcaatccagcccatggcaggcaggtgacagtccaggaattcgctcttttctttaccatctttgatgagaccaagtcctggtacttcacggaaaacatggagcgcaattgcagagccccctgtaacatacagatggaggaccctacctttaaggaaaattatcggttccacgcaatcaacggatacattatggatacactccctggccttgtgatggctcaggaccaacgaatcaggtggtacctcctcagcatgggttctaatgagaacatacactccattcacttttcaggacatgtgttcactgtccggaagaaagaagagtataagatggccctctacaatttgtatccaggcgtgtttgagaccgttgaaatgcttccctctaaagctggcatctggagagtagagtgcttgatcggagaacatcttcacgcaggtatgagcaccttgttcctcgtgtacagcaacaaatgtcagaccccacttggcatggccagtggacacattcgcgactttcagatcacagcatctggccagtatggacaatgggccccaaagttggctcgcctccattactccggtagcataaatgcgtggtccactaaagaacctttcagctggattaaggtcgatcttcttgcccccatgatcatccacggcattaagacacagggagcgaggcagaaattctcctccctctacatctcacagttcattattatgtatagtttggacggcaagaagtggcaaacttatagaggtaacagtactggaacactcatggtgttcttcggcaacgttgatagctctggcatcaaacacaacatctttaatcctcccataatagctcggtacatcagattgcatccgacccactacagcattaggagtacactccgaatggagcttatgggttgcgacttgaattcctgttcaatgccactcggaatggagtctaaagccatctctgatgcacagataaccgccagtagctactttacgaacatgtttgctacgtggtcaccctctaaggcaaggcttcatttgcaaggccggtctaatgcctggagacctcaggtgaacaacccgaaagaatggctccaggtggactttcagaagaccatgaaagtaacaggtgtcactactcagggagttaagtccttgctcaccagcatgtatgtgaaggagttccttatttcctcatcacaagatggccaccagtggaccctcttctttcagaatggtaaggtcaaagtgtttcagggcaatcaagacagcttcacacccgtggtgaacagtcttgatcctccactcttgacacgataccttcgaatccatccacagtcttgggttcaccagattgcattgcgcatggaagtacttggatgcgaggctcaggacctctac

SEQ ID NO: 2804 - protein, 1457 aa, synthetic construct
  REGION 1..1457: note = Variant of human B-domain deleted Factor VIII
MQIELSTCFFLCLLRFCFSATRRYYLGAVELSWDYMQSDLGELPVDARFPPRVPKSFPFNTSVVYKKTLFVEFTDHLFNIAKPRPPWMGLLGPTIQAEVYDTVVITLKNMASHPVSLHAVGVSYWKASEGAEYDDQTSQREKEDDKVFPGGSHTYVWQVLKENGPMASDPLCLTYSYLSHVDLVKDLNSGLIGALLVCREGSLAKEKTQTLHKFILLFAVFDEGKSWHSETKNSLMQDRDAASARAWPKMHTVNGYVNRSLPGLIGCHRKSVYWHVIGMGTTPEVHSIFLEGHTFLVRNHRQASLEISPITFLTAQTLLMDLGQFLLFCHISSHQHDGMEAYVKVDSCPEEPQLRMKNNEEAEDYDDDLTDSEMDVVRFDDDNSPSFIQIRSVAKKHPKTWVHYIAAEEEDWDYAPLVLAPDDRSYKSQYLNNGPQRIGRKYKKVRFMAYTDETFKTREAIQHESGILGPLLYGEVGDTLLIIFKNQASRPYNIYPHGITDVRPLYSRRLPKGVKHLKDFPILPGEIFKYKWTVTVEDGPTKSDPRCLTRYYSSFVNMERDLASGLIGPLLICYKESVDQRGNQIMSDKRNVILFSVFDENRSWYLTENIQRFLPNPAGVQLEDPEFQASNIMHSINGYVFDSLQLSVCLHEVAYWYILSIGAQTDFLSVFFSGYTFKHKMVYEDTLTLFPFSGETVFMSMENPGLWILGCHNSDFRNRGMTALLKVSSCDKNTGDYYEDSYEDISAYLLSKNNAIEPRSFSQNPPVLKRHQREVTRTTLQSDQEEIDYDDTISVEMKKEDFDIYDEDENQSPRSFQKKTRHYFIAAVERLWDYGMSSSPHVLRNRAQSGSVPQFKKVVFQEFTDGSFTQPLYRGELNEHLGLLGPYIRAEVEDNIMVTFRNQASRPYSFYSSLISYEEDQRQGAEPRKNFVKPNETKTYFWKVQHHMAPTKDEFDCKAWAYFSDVDLEKDVHSGLIGPLLVCHTNTLNPAHGRQVTVQEFALFFTIFDETKSWYFTENMERNCRAPCNIQMEDPTFKENYRFHAINGYIMDTLPGLVMAQDQRIRWYLLSMGSNENIHSIHFSGHVFTVRKKEEYKMALYNLYPGVFETVEMLPSKAGIWRVECLIGEHLHAGMSTLFLVYSNKCQTPLGMASGHIRDFQITASGQYGQWAPKLARLHYSGSINAWSTKEPFSWIKVDLLAPMIIHGIKTQGARQKFSSLYISQFIIMYSLDGKKWQTYRGNSTGTLMVFFGNVDSSGIKHNIFNPPIIARYIRLHPTHYSIRSTLRMELMGCDLNSCSMPLGMESKAISDAQITASSYFTNMFATWSPSKARLHLQGRSNAWRPQVNNPKEWLQVDFQKTMKVTGVTTQGVKSLLTSMYVKEFLISSSQDGHQWTLFFQNGKVKVFQGNQDSFTPVVNSLDPPLLTRYLRIHPQSWVHQIALRMEVLGCEAQDLY

SEQ ID NO: 2805 - DNA, 4371 bp, synthetic construct
  misc_feature 1..4371: note = Variant of human B-domain deleted Factor VIII
  source 1..4371: mol_type = other DNA
atgcagattgaactgtctacctgcttcttcctctgtttgctgaggttctgctttagcgccactagacggtactaccttggcgctgtggagctgtcctgggactatatgcagagtgatttgggagagcttcccgtcgacgcacgatttcctcctcgcgttccaaagtcatttcccttcaacacaagcgtggtgtacaagaagacgctcttcgtcgaattcaccgatcacctgttcaatatcgccaaacccagaccaccatggatgggtcttttggggcctaccatacaagcggaggtgtatgacacagttgttatcactctcaagaacatggcttctcatccggtaagtcttcacgcagtgggcgtgtcctactggaaagcttcagaaggagccgagtatgatgatcagacatcccagagggagaaagaagacgacaaggtatttccaggtgggtctcatacctatgtgtggcaagtgctcaaagagaatggccctatggcaagcgatccgctctgtttgacttacagctacctttcacacgttgacctcgtcaaggacctcaactccgggttgattggagccttgttggtatgcagggaaggatctcttgccaaagagaagacacagaccctccacaagtttatccttctctttgctgtgttcgatgagggcaaaagttggcatagcgaaacgaagaattccctcatgcaggatcgcgacgcagccagcgccagagcttggcccaagatgcacactgtgaacggatatgtcaataggtcacttcctggcttgattgggtgtcatcggaaaagtgtctactggcacgtgatcggaatggggacaacaccagaggtccactccatatttctcgaaggccataccttccttgttcgaaaccacagacaggcatccttggagatctctcccattacctttctcactgcccaaacgctccttatggacttgggtcagttccttctcttctgccatatcagctcacaccagcatgatggtatggaagcttatgtgaaagtcgacagttgtcctgaggagccacagttgcgcatgaagaataatgaagaagccgaggattacgacgacgatctcaccgattctgagatggacgtggtgaggtttgatgacgacaactctccctccttcattcaaatccggagcgtggcgaagaaacaccccaagacttgggtccactatatagcggcggaagaggaggattgggattacgctcctcttgtattggcaccagatgaccgctcatacaaaagccagtacctcaacaacggaccgcagagaattggccggaagtataagaaagtgcgatttatggcctatacagacgaaacctttaagacaagggaggccatccagcatgagagtgggattttgggacctcttctttacggcgaagttggtgataccctcctcatcatcttcaagaatcaagcttctcgcccctataacatttacccacacgggatcactgacgttaggcctttgtatagcagaagacttcccaaaggcgtgaagcatctcaaagacttccccattttgccaggcgagatctttaagtacaaatggaccgtcacagtggaagatggaccgactaaatcagaccctcgatgccttacgcggtactattcctccttcgtgaatatggagagagatttggcaagcggactcataggaccactcctcatctgttacaaggaatctgtagaccagaggggtaaccagattatgagtgataaacgcaatgtgatcctttttagcgtcttcgacgagaaccggtcctggtacttgaccgagaatatacaaaggttccttcccaaccccgcaggcgttcagttggaagaccctgagtttcaggccagcaatattatgcactcaatcaacggctatgtgtttgatagtctccagctttctgtttgcctccatgaagtagcctattggtacatcttgtcaattggtgctcaaacagacttcctctccgtcttcttctccggctacacctttaagcacaagatggtgtatgaggacactctcacactctttccattttctggagaaaccgtgttcatggctatggagaatccaggcctttggatcttgggttgccacaacagtgattttcgcaatcggggaatgactgctctcctcaaagtcagcagctgtgataagaacacaggcgactattacgaagattcttacgaggacataagtgcctacttgttgtccaagaataacgccattgagcccagatcattctcccagaatcctcccgtgcttaaaaggcatcagcgcgaaatcaccagaactactcttcagtctgatcaagaggagattgactatgacgacaccataagcgtggaaatgaagaaggaggatttcgatatctatgacgaagatgagaaccagtctccgcggagctttcagaagaagacgcgacactacttcattgcagcagtcgaaaggctttgggactacggtatgtcatcatcccctcatgtgttgcgcaatagagctcagagtggaagtgttccacagttcaagaaagtcgtctttcaagagtttacagatggcagcttcacacagcctctctatcggggcgagcttaacgaacatttgggactccttggtccctatatccgagccgaagtggaggacaacattatggttacctttaggaatcaagcctctcgcccctacagcttctactcctccctcatcagttatgaggaggatcagagacaaggcgctgaaccacggaagaactttgtgaaaccgaatgagacgaagacctacttctggaaagtacagcaccacatggcccccacaaaagacgaattcgattgcaaagcatgggcgtatttttcagacgttgacttggagaaagatgtacattcaggacttattggtcctttgttggtgtgtcacactaacactctcaatccagcccatggcaggcaggtgacagtccaggaattcgctcttttctttaccatctttgatgagaccaagtcctggtacttcacggaaaacatggagcgcaattgcagagccccctgtaacatacagatggaggaccctacctttaaggaaaattatcggttccacgcaatcaacggatacattatggatacactccctggccttgtgatggctcaggaccaacgaatcaggtggtacctcctcagcatgggttctaatgagaacatacactccattcacttttcaggacatgtgttcactgtccggaagaaagaagagtataagatggccctctacaatttgtatccaggcgtgtttgagaccgttgaaatgcttccctctaaagctggcatctggagagtagagtgcttgatcggagaacatcttcacgcaggtatgagcaccttgttcctcgtgtacagcaacaaatgtcagaccccacttggcatggccagtggacacattcgcgactttcagatcacagcatctggccagtatggacaatgggccccaaagttggctcgcctccattactccggtagcataaatgcgtggtccactaaagaacctttcagctggattaaggtcgatcttcttgcccccatgatcatccacggcattaagacacagggagcgaggcagaaattctcctccctctacatctcacagttcattattatgtatagtttggacggcaagaagtggcaaacttatagaggtaacagtactggaacactcatggtgttcttcggcaacgttgatagctctggcatcaaacacaacatctttaatcctcccataatagctcggtacatcagattgcatccgacccactacagcattaggagtacactccgaatggagcttatgggttgcgacttgaattcctgttcaatgccactcggaatggagtctaaagccatctctgatgcacagataaccgccagtagctactttacgaacatgtttgctacgtggtcaccctctaaggcaaggcttcatttgcaaggccggtctaatgcctggagacctcaggtgaacaacccgaaagaatggctccaggtggactttcagaagaccatgaaagtaacaggtgtcactactcagggagttaagtccttgctcaccagcatgtatgtgaaggagttccttatttcctcatcacaagatggccaccagtggaccctcttctttcagaatggtaaggtcaaagtgtttcagggcaatcaagacagcttcacacccgtggtgaacagtcttgatcctccactcttgacacgataccttcgaatccatccacagtcttgggttcaccagattgcattgcgcatggaagtacttggatgcgaggctcaggacctctac

SEQ ID NO: 2806 - protein, 1457 aa, synthetic construct
  REGION 1..1457: note = Variant of human B-domain deleted Factor VIII
MQIELSTCFFLCLLRFCFSATRRYYLGAVELSWDYMQSDLGELPVDARFPPRVPKSFPFNTSVVYKKTLFVEFTDHLFNIAKPRPPWMGLLGPTIQAEVYDTVVITLKNMASHPVSLHAVGVSYWKASEGAEYDDQTSQREKEDDKVFPGGSHTYVWQVLKENGPMASDPLCLTYSYLSHVDLVKDLNSGLIGALLVCREGSLAKEKTQTLHKFILLFAVFDEGKSWHSETKNSLMQDRDAASARAWPKMHTVNGYVNRSLPGLIGCHRKSVYWHVIGMGTTPEVHSIFLEGHTFLVRNHRQASLEISPITFLTAQTLLMDLGQFLLFCHISSHQHDGMEAYVKVDSCPEEPQLRMKNNEEAEDYDDDLTDSEMDVVRFDDDNSPSFIQIRSVAKKHPKTWVHYIAAEEEDWDYAPLVLAPDDRSYKSQYLNNGPQRIGRKYKKVRFMAYTDETFKTREAIQHESGILGPLLYGEVGDTLLIIFKNQASRPYNIYPHGITDVRPLYSRRLPKGVKHLKDFPILPGEIFKYKWTVTVEDGPTKSDPRCLTRYYSSFVNMERDLASGLIGPLLICYKESVDQRGNQIMSDKRNVILFSVFDENRSWYLTENIQRFLPNPAGVQLEDPEFQASNIMHSINGYVFDSLQLSVCLHEVAYWYILSIGAQTDFLSVFFSGYTFKHKMVYEDTLTLFPFSGETVFMAMENPGLWILGCHNSDFRNRGMTALLKVSSCDKNTGDYYEDSYEDISAYLLSKNNAIEPRSFSQNPPVLKRHQREITRTTLQSDQEEIDYDDTISVEMKKEDFDIYDEDENQSPRSFQKKTRHYFIAAVERLWDYGMSSSPHVLRNRAQSGSVPQFKKVVFQEFTDGSFTQPLYRGELNEHLGLLGPYIRAEVEDNIMVTFRNQASRPYSFYSSLISYEEDQRQGAEPRKNFVKPNETKTYFWKVQHHMAPTKDEFDCKAWAYFSDVDLEKDVHSGLIGPLLVCHTNTLNPAHGRQVTVQEFALFFTIFDETKSWYFTENMERNCRAPCNIQMEDPTFKENYRFHAINGYIMDTLPGLVMAQDQRIRWYLLSMGSNENIHSIHFSGHVFTVRKKEEYKMALYNLYPGVFETVEMLPSKAGIWRVECLIGEHLHAGMSTLFLVYSNKCQTPLGMASGHIRDFQITASGQYGQWAPKLARLHYSGSINAWSTKEPFSWIKVDLLAPMIIHGIKTQGARQKFSSLYISQFIIMYSLDGKKWQTYRGNSTGTLMVFFGNVDSSGIKHNIFNPPIIARYIRLHPTHYSIRSTLRMELMGCDLNSCSMPLGMESKAISDAQITASSYFTNMFATWSPSKARLHLQGRSNAWRPQVNNPKEWLQVDFQKTMKVTGVTTQGVKSLLTSMYVKEFLISSSQDGHQWTLFFQNGKVKVFQGNQDSFTPVVNSLDPPLLTRYLRIHPQSWVHQIALRMEVLGCEAQDLY

SEQ ID NO: 2807 - DNA, 4371 bp, synthetic construct
  misc_feature 1..4371: note = Variant of human B-domain deleted Factor VIII
  source 1..4371: mol_type = other DNA
atgcagattgaactgtctacctgcttcttcctctgtttgctgaggttctgctttagcgccactagacggtactaccttggcgctgtggagctgtcctgggactatatgcagagtgatttgggagagcttcccgtcgacgcacgatttcctcctcgcgttccaaagtcatttcccttcaacacaagcgtggtgtacaagaagacgctcttcgtcgaattcaccgatcacctgttcaatatcgccaaacccagaccaccatggatgggtcttttggggcctaccatacaagcggaggtgtatgacacagttgttatcactctcaagaacatggcttctcatccggtaagtcttcacgcagtgggcgtgtcctactggaaagcttcagaaggagccgagtatgatgatcagacatcccagagggagaaagaagacgacaaggtatttccaggtgggtctcatacctatgtgtggcaagtgctcaaagagaatggccctatggcaagcgatccgctctgtttgacttacagctacctttcacacgttgacctcgtcaaggacctcaactccgggttgattggagccttgttggtatgcagggaaggatctcttgccaaagagaagacacagaccctccacaagtttatccttctctttgctgtgttcgatgagggcaaaagttggcatagcgaaacgaagaattccctcatgcaggatcgcgacgcagccagcgccagagcttggcccaagatgcacactgtgaacggatatgtcaataggtcacttcctggcttgattgggtgtcatcggaaaagtgtctactggcacgtgatcggaatggggacaacaccagaggtccactccatatttctcgaaggccataccttccttgttcgaaaccacagacaggcatccttggagatctctcccattacctttctcactgcccaaacgctccttatggacttgggtcagttccttctcttctgccatatcagctcacaccagcatgatggtatggaagcttatgtgaaagtcgacagttgtcctgaggagccacagttgcgcatgaagaataatgaagaagccgaggattacgacgacgatctcaccgattctgagatggacgtggtgaggtttgatgacgacaactctccctccttcattcaaatccggagcgtggcgaagaaacaccccaagacttgggtccactatatagcggcggaagaggaggattgggattacgctcctcttgtattggcaccagatgaccgctcatacaaaagccagtacctcaacaacggaccgcagagaattggccggaagtataagaaagtgcgatttatggcctatacagacgaaacctttaagacaagggaggccatccagcatgagagtgggattttgggacctcttctttacggcgaagttggtgataccctcctcatcatcttcaagaatcaagcttctcgcccctataacatttacccacacgggatcactgacgttaggcctttgtatagcagaagacttcccaaaggcgtgaagcatctcaaagacttccccattttgccaggcgagatctttaagtacaaatggaccgtcacagtggaagatggaccgactaaatcagaccctcgatgccttacgcggtactattcctccttcgtgaatatggagagagatttggcaagcggactcataggaccactcctcatctgttacaaggaatctgtagaccagaggggtaaccagattatgagtgataaacgcaatgtgatcctttttagcgtcttcgacgagaaccggtcctggtacttgaccgagaatatacaaaggttccttcccaaccccgcaggcgttcagttggaagaccctgagtttcaggccagcaatattatgcactcaatcaacggctatgtgtttgatagtctccagctttctgtttgcctccatgaagtagcctattggtacatcttgtcaattggtgctcaaacagacttcctctccgtcttcttctccggctacacctttaagcacaagatggtgtatgaggacactctcacactctttccattttctggagaaaccgtgttcatgagcatggagaatccaggcctttggatcttgggttgccacaacagtgattttcgcaatcggggaatgactgctctcctcaaagtcagcagctgtgataagaacacaggcgactattacgaagattcttacgaggacataagtgcctacttgttgtccaagaataacgccattgagcccagatcattctcccagaatcctcccgtgcttaaaaggcatcagcgcgaaatcaccagaactactcttcagtctgatcaagaggagattgactatgacgacaccataagcgtggaaatgaagaaggaggatttcgatatctatgacgaagatgagaaccagtctccgcggagctttcagaagaagacgcgacactacttcattgcagcagtcgaaaggctttgggactacggtatgtcatcatcccctcatgtgttgcgcaatagagctcagagtggaagtgttccacagttcaagaaagtcgtctttcaagagtttacagatggcagcttcacacagcctctctatcggggcgagcttaacgaacatttgggactccttggtccctatatccgagccgaagtggaggacaacattatggttacctttaggaatcaagcctctcgcccctacagcttctactcctccctcatcagttatgaggaggatcagagacaaggcgctgaaccacggaagaactttgtgaaaccgaatgagacgaagacctacttctggaaagtacagcaccacatggcccccacaaaagacgaattcgattgcaaagcatgggcgtatttttcagacgttgacttggagaaagatgtacattcaggacttattggtcctttgttggtgtgtcacactaacactctcaatccagcccatggcaggcaggtgacagtccaggaattcgctcttttctttaccatctttgatgagaccaagtcctggtacttcacggaaaacatggagcgcaattgcagagccccctgtaacatacagatggaggaccctacctttaaggaaaattatcggttccacgcaatcaacggatacattatggatacactccctggccttgtgatggctcaggaccaacgaatcaggtggtacctcctcagcatgggttctaatgagaacatacactccattcacttttcaggacatgtgttcactgtccggaagaaagaagagtataagatggccctctacaatttgtatccaggcgtgtttgagaccgttgaaatgcttccctctaaagctggcatctggagagtagagtgcttgatcggagaacatcttcacgcaggtatgagcaccttgttcctcgtgtacagcaacaaatgtcagaccccacttggcatggccagtggacacattcgcgactttcagatcacagcatctggccagtatggacaatgggccccaaagttggctcgcctccattactccggtagcataaatgcgtggtccactaaagaacctttcagctggattaaggtcgatcttcttgcccccatgatcatccacggcattaagacacagggagcgaggcagaaattctcctccctctacatctcacagttcattattatgtatagtttggacggcaagaagtggcaaacttatagaggtaacagtactggaacactcatggtgttcttcggcaacgttgatagctctggcatcaaacacaacatctttaatcctcccataatagctcggtacatcagattgcatccgacccactacagcattaggagtacactccgaatggagcttatgggttgcgacttgaattcctgttcaatgccactcggaatggagtctaaagccatctctgatgcacagataaccgccagtagctactttacgaacatgtttgctacgtggtcaccctctaaggcaaggcttcatttgcaaggccggtctaatgcctggagacctcaggtgaacaacccgaaagaatggctccaggtggactttcagaagaccatgaaagtaacaggtgtcactactcagggagttaagtccttgtataccagcatgtatgtgaaggagttccttatttcctcatcacaagatggccaccagtggaccctcttctttcagaatggtaaggtcaaagtgtttcagggcaatcaagacagcttcacacccgtggtgaacagtcttgatcctccactcttgacacgataccttcgaatccatccacagtcttgggttcaccagattgcattgcgcatggaagtacttggatgcgaggctcaggacctctac

SEQ ID NO: 2808 - protein, 1457 aa, synthetic construct
  REGION 1..1457: note = Variant of human B-domain deleted Factor VIII
MQIELSTCFFLCLLRFCFSATRRYYLGAVELSWDYMQSDLGELPVDARFPPRVPKSFPFNTSVVYKKTLFVEFTDHLFNIAKPRPPWMGLLGPTIQAEVYDTVVITLKNMASHPVSLHAVGVSYWKASEGAEYDDQTSQREKEDDKVFPGGSHTYVWQVLKENGPMASDPLCLTYSYLSHVDLVKDLNSGLIGALLVCREGSLAKEKTQTLHKFILLFAVFDEGKSWHSETKNSLMQDRDAASARAWPKMHTVNGYVNRSLPGLIGCHRKSVYWHVIGMGTTPEVHSIFLEGHTFLVRNHRQASLEISPITFLTAQTLLMDLGQFLLFCHISSHQHDGMEAYVKVDSCPEEPQLRMKNNEEAEDYDDDLTDSEMDVVRFDDDNSPSFIQIRSVAKKHPKTWVHYIAAEEEDWDYAPLVLAPDDRSYKSQYLNNGPQRIGRKYKKVRFMAYTDETFKTREAIQHESGILGPLLYGEVGDTLLIIFKNQASRPYNIYPHGITDVRPLYSRRLPKGVKHLKDFPILPGEIFKYKWTVTVEDGPTKSDPRCLTRYYSSFVNMERDLASGLIGPLLICYKESVDQRGNQIMSDKRNVILFSVFDENRSWYLTENIQRFLPNPAGVQLEDPEFQASNIMHSINGYVFDSLQLSVCLHEVAYWYILSIGAQTDFLSVFFSGYTFKHKMVYEDTLTLFPFSGETVFMSMENPGLWILGCHNSDFRNRGMTALLKVSSCDKNTGDYYEDSYEDISAYLLSKNNAIEPRSFSQNPPVLKRHQREITRTTLQSDQEEIDYDDTISVEMKKEDFDIYDEDENQSPRSFQKKTRHYFIAAVERLWDYGMSSSPHVLRNRAQSGSVPQFKKVVFQEFTDGSFTQPLYRGELNEHLGLLGPYIRAEVEDNIMVTFRNQASRPYSFYSSLISYEEDQRQGAEPRKNFVKPNETKTYFWKVQHHMAPTKDEFDCKAWAYFSDVDLEKDVHSGLIGPLLVCHTNTLNPAHGRQVTVQEFALFFTIFDETKSWYFTENMERNCRAPCNIQMEDPTFKENYRFHAINGYIMDTLPGLVMAQDQRIRWYLLSMGSNENIHSIHFSGHVFTVRKKEEYKMALYNLYPGVFETVEMLPSKAGIWRVECLIGEHLHAGMSTLFLVYSNKCQTPLGMASGHIRDFQITASGQYGQWAPKLARLHYSGSINAWSTKEPFSWIKVDLLAPMIIHGIKTQGARQKFSSLYISQFIIMYSLDGKKWQTYRGNSTGTLMVFFGNVDSSGIKHNIFNPPIIARYIRLHPTHYSIRSTLRMELMGCDLNSCSMPLGMESKAISDAQITASSYFTNMFATWSPSKARLHLQGRSNAWRPQVNNPKEWLQVDFQKTMKVTGVTTQGVKSLYTSMYVKEFLISSSQDGHQWTLFFQNGKVKVFQGNQDSFTPVVNSLDPPLLTRYLRIHPQSWVHQIALRMEVLGCEAQDLY

SEQ ID NO: 2809 - DNA, 4371 bp, synthetic construct
  misc_feature 1..4371: note = Variant of human B-domain deleted Factor VIII
  source 1..4371: mol_type = other DNA
atgcagattgaactgtctacctgcttcttcctctgtttgctgaggttctgctttagcgccactagacggtactaccttggcgctgtggagctgtcctgggactatatgcagagtgatttgggagagcttcccgtcgacgcacgatttcctcctcgcgttccaaagtcatttcccttcaacacaagcgtggtgtacaagaagacgctcttcgtcgaattcaccgatcacctgttcaatatcgccaaacccagaccaccatggatgggtcttttggggcctaccatacaagcggaggtgtatgacacagttgttatcactctcaagaacatggcttctcatccggtaagtcttcacgcagtgggcgtgtcctactggaaagcttcagaaggagccgagtatgatgatcagacatcccagagggagaaagaagacgacaaggtatttccaggtgggtctcatacctatgtgtggcaagtgctcaaagagaatggccctatggcaagcgatccgctctgtttgacttacagctacctttcacacgttgacctcgtcaaggacctcaactccgggttgattggagccttgttggtatgcagggaaggatctcttgccaaagagaagacacagaccctccacaagtttatccttctctttgctgtgttcgatgagggcaaaagttggcatagcgaaacgaagaattccctcatgcaggatcgcgacgcagccagcgccagagcttggcccaagatgcacactgtgaacggatatgtcaataggtcacttcctggcttgattgggtgtcatcggaaaagtgtctactggcacgtgatcggaatggggacaacaccagaggtccactccatatttctcgaaggccataccttccttgttcgaaaccacagacaggcatccttggagatctctcccattacctttctcactgcccaaacgctccttctggacttgggtcagttccttctcttctgccatatcagctcacaccagcatgatggtatggaagcttatgtgaaagtcgacagttgtcctgaggagccacagttgcgcatgaagaataatgaagaagccgaggattacgacgacgatctcaccgattctgagatggacgtggtgaggtttgatgacgacaactctccctccttcattcaaatccggagcgtggcgaagaaacaccccaagacttgggtccactatatagcggcggaagaggaggattgggattacgctcctcttgtattggcaccagatgaccgctcatacaaaagccagtacctcaacaacggaccgcagagaattggccggaagtataagaaagtgcgatttatggcctatacagacgaaacctttaagacaagggaggccatccagcatgagagtgggattttgggacctcttctttacggcgaagttggtgataccctcctcatcatcttcaagaatcaagcttctcgcccctataacatttacccacacgggatcactgacgttaggcctttgtatagcagaagacttcccaaaggcgtgaagcatctcaaagacttccccattttgccaggcgagatctttaagtacaaatggaccgtcacagtggaagatggaccgactaaatcagaccctcgatgccttacgcggtactattcctccttcgtgaatatggagagagatttggcaagcggactcataggaccactcctcatctgttacaaggaatctgtagaccagaggggtaaccagattatgagtgataaacgcaatgtgatcctttttagcgtcttcgacgagaaccggtcctggtacttgaccgagaatatacaaaggttccttcccaaccccgcaggcgttcagttggaagaccctgagtttcaggccagcaatattatgcactcaatcaacggctatgtgtttgatagtctccagctttctgtttgcctccatgaagtagcctattggtacatcttgtcaattggtgctcaaacagacttcctctccgtcttcttctccggctacacctttaagcacaagatggtgtatgaggacactctcacactctttccattttctggagaaaccgtgttcatgagcatggagaatccaggcctttggatcttgggttgccacaacagtgattttcgcaatcggggaatgactgctctcctcaaagtcagcagctgtgataagaacacaggcgactattacgaagattcttacgaggacataagtgcctacttgttgtccaagaataacgccattgagcccagatcattctcccagaatcctcccgtgcttaaaaggcatcagcgcgaaatcaccagaactactcttcagtctgatcaagaggagattgactatgacgacaccataagcgtggaaatgaagaaggaggatttcgatatctatgacgaagatgagaaccagtctccgcggagctttcagaagaagacgcgacactacttcattgcagcagtcgaaaggctttgggactacggtatgtcatcatcccctcatgtgttgcgcaatagagctcagagtggaagtgttccacagttcaagaaagtcgtctttcaagagtttacagatggcagcttcacacagcctctctatcggggcgagcttaacgaacatttgggactccttggtccctatatccgagccgaagtggaggacaacattatggttacctttaggaatcaagcctctcgcccctacagcttctactcctccctcatcagttatgaggaggatcagagacaaggcgctgaaccacggaagaactttgtgaaaccgaatgagacgaagacctacttctggaaagtacagcaccacatggcccccacaaaagacgaattcgattgcaaagcatgggcgtatttttcagacgttgacttggagaaagatgtacattcaggacttattggtcctttgttggtgtgtcacactaacactctcaatccagcccatggcaggcaggtgacagtccaggaattcgctcttttctttaccatctttgatgagaccaagtcctggtacttcacggaaaacatggagcgcaattgcagagccccctgtaacatacagatggaggaccctacctttaaggaaaattatcggttccacgcaatcaacggatacattatggatacactccctggccttgtgatggctcaggaccaacgaatcaggtggtacctcctcagcatgggttctaatgagaacatacactccattcacttttcaggacatgtgttcactgtccggaagaaagaagagtataagatggccctctacaatttgtatccaggcgtgtttgagaccgttgaaatgcttccctctaaagctggcatctggagagtagagtgcttgatcggagaacatcttcacgcaggtatgagcaccttgttcctcgtgtacagcaacaaatgtcagaccccacttggcatggccagtggacacattcgcgactttcagatcacagcatctggccagtatggacaatgggccccaaagttggctcgcctccattactccggtagcataaatgcgtggtccactaaagaacctttcagctggattaaggtcgatcttcttgcccccatgatcatccacggcattaagacacagggagcgaggcagaaattctcctccctctacatctcacagttcattattatgtatagtttggacggcaagaagtggcaaacttatagaggtaacagtactggaacactcatggtgttcttcggcaacgttgatagctctggcatcaaacacaacatctttaatcctcccataatagctcggtacatcagattgcatccgacccactacagcattaggagtacactccgaatggagcttatgggttgcgacttgaattcctgttcaatgccactcggaatggagtctaaagccatctctgatgcacagataaccgccagtagctactttacgaacatgtttgctacgtggtcaccctctaaggcaaggcttcatttgcaaggccggtctaatgcctggagacctcaggtgaacaacccgaaagaatggctccaggtggactttcagaagaccatgaaagtaacaggtgtcactactcagggagttaagtccttgctcaccagcatgtatgtgaaggagttccttatttcctcatcacaagatggccaccagtggaccctcttctttcagaatggtaaggtcaaagtgtttcagggcaatcaagacagcttcacacccgtggtgaacagtcttgatcctccactcttgacacgataccttcgaatccatccacagtcttgggttcaccagattgcattgcgcatggaagtacttggatgcgaggctcaggacctctac

SEQ ID NO: 2810 - protein, 1457 aa, synthetic construct
  REGION 1..1457: note = Variant of human B-domain deleted Factor VIII
MQIELSTCFFLCLLRFCFSATRRYYLGAVELSWDYMQSDLGELPVDARFPPRVPKSFPFNTSVVYKKTLFVEFTDHLFNIAKPRPPWMGLLGPTIQAEVYDTVVITLKNMASHPVSLHAVGVSYWKASEGAEYDDQTSQREKEDDKVFPGGSHTYVWQVLKENGPMASDPLCLTYSYLSHVDLVKDLNSGLIGALLVCREGSLAKEKTQTLHKFILLFAVFDEGKSWHSETKNSLMQDRDAASARAWPKMHTVNGYVNRSLPGLIGCHRKSVYWHVIGMGTTPEVHSIFLEGHTFLVRNHRQASLEISPITFLTAQTLLLDLGQFLLFCHISSHQHDGMEAYVKVDSCPEEPQLRMKNNEEAEDYDDDLTDSEMDVVRFDDDNSPSFIQIRSVAKKHPKTWVHYIAAEEEDWDYAPLVLAPDDRSYKSQYLNNGPQRIGRKYKKVRFMAYTDETFKTREAIQHESGILGPLLYGEVGDTLLIIFKNQASRPYNIYPHGITDVRPLYSRRLPKGVKHLKDFPILPGEIFKYKWTVTVEDGPTKSDPRCLTRYYSSFVNMERDLASGLIGPLLICYKESVDQRGNQIMSDKRNVILFSVFDENRSWYLTENIQRFLPNPAGVQLEDPEFQASNIMHSINGYVFDSLQLSVCLHEVAYWYILSIGAQTDFLSVFFSGYTFKHKMVYEDTLTLFPFSGETVFMSMENPGLWILGCHNSDFRNRGMTALLKVSSCDKNTGDYYEDSYEDISAYLLSKNNAIEPRSFSQNPPVLKRHQREITRTTLQSDQEEIDYDDTISVEMKKEDFDIYDEDENQSPRSFQKKTRHYFIAAVERLWDYGMSSSPHVLRNRAQSGSVPQFKKVVFQEFTDGSFTQPLYRGELNEHLGLLGPYIRAEVEDNIMVTFRNQASRPYSFYSSLISYEEDQRQGAEPRKNFVKPNETKTYFWKVQHHMAPTKDEFDCKAWAYFSDVDLEKDVHSGLIGPLLVCHTNTLNPAHGRQVTVQEFALFFTIFDETKSWYFTENMERNCRAPCNIQMEDPTFKENYRFHAINGYIMDTLPGLVMAQDQRIRWYLLSMGSNENIHSIHFSGHVFTVRKKEEYKMALYNLYPGVFETVEMLPSKAGIWRVECLIGEHLHAGMSTLFLVYSNKCQTPLGMASGHIRDFQITASGQYGQWAPKLARLHYSGSINAWSTKEPFSWIKVDLLAPMIIHGIKTQGARQKFSSLYISQFIIMYSLDGKKWQTYRGNSTGTLMVFFGNVDSSGIKHNIFNPPIIARYIRLHPTHYSIRSTLRMELMGCDLNSCSMPLGMESKAISDAQITASSYFTNMFATWSPSKARLHLQGRSNAWRPQVNNPKEWLQVDFQKTMKVTGVTTQGVKSLLTSMYVKEFLISSSQDGHQWTLFFQNGKVKVFQGNQDSFTPVVNSLDPPLLTRYLRIHPQSWVHQIALRMEVLGCEAQDLY

SEQ ID NO: 2811 - DNA, 4371 bp, synthetic construct
  misc_feature 1..4371: note = Variant of human B-domain deleted Factor VIII
  source 1..4371: mol_type = other DNA
atgcagattgaactgtctacctgcttcttcctctgtttgctgaggttctgctttagcgccactagacggtactaccttggcgctgtggagctgtcctgggactatatgcagagtgatttgggagagcttcccgtcgacgcacgatttcctcctcgcgttccaaagtcatttcccttcaacacaagcgtggtgtacaagaagacgctcttcgtcgaattcaccgatcacctgttcaatatcgccaaacccagaccaccatggatgggtcttttggggcctaccatacaagcggaggtgtatgacacagttgttatcactctcaagaacatggcttctcatccggtaagtcttcacgcagtgggcgtgtcctactggaaagcttcagaaggagccgagtatgatgatcagacatcccagagggagaaagaagacgacaaggtatttccaggtgggtctcatacctatgtgtggcaagtgctcaaagagaatggccctatggcaagcgatccgctctgtttgacttacagctacctttcacacgttgacctcgtcaaggacctcaactccgggttgattggagccttgttggtatgcagggaaggatctcttgccaaagagaagacacagaccctccacaagtttatccttctctttgctgtgttcgatgagggcaaaagttggcatagcgaaacgaagaattccctcatgcaggatcgcgacgcagccagcgccagagcttggcccaagatgcacactgtgaacggatatgtcaataggtcacttcctggcttgattgggtgtcatcggaaaagtgtctactggcacgtgatcggaatggggacaacaccagaggtccactccatatttctcgaaggccataccttccttgttcgaaaccacagacaggcatccttggagatctctcccattacctttctcactgcccaaacgcggcttatggacttgggtcagttccttctcttctgccatatcagctcacaccagcatgatggtatggaagcttatgtgaaagtcgacagttgtcctgaggagccacagttgcgcatgaagaataatgaagaagccgaggattacgacgacgatctcaccgattctgagatggacgtggtgaggtttgatgacgacaactctccctccttcattcaaatccggagcgtggcgaagaaacaccccaagacttgggtccactatatagcggcggaagaggaggattgggattacgctcctcttgtattggcaccagatgaccgctcatacaaaagccagtacctcaacaacggaccgcagagaattggccggaagtataagaaagtgcgatttatggcctatacagacgaaacctttaagacaagggaggccatccagcatgagagtgggattttgggacctcttctttacggcgaagttggtgataccctcctcatcatcttcaagaatcaagcttctcgcccctataacatttacccacacgggatcactgacgttaggcctttgtatagcagaagacttcccaaaggcgtgaagcatctcaaagacttccccattttgccaggcgagatctttaagtacaaatggaccgtcacagtggaagatggaccgactaaatcagaccctcgatgccttacgcggtactattcctccttcgtgaatatggagagagatttggcaagcggactcataggaccactcctcatctgttacaaggaatctgtagaccagaggggtaaccagattatgagtgataaacgcaatgtgatcctttttagcgtcttcgacgagaaccggtcctggtacttgaccgagaatatacaaaggttccttcccaaccccgcaggcgttcagttggaagaccctgagtttcaggccagcaatattatgcactcaatcaacggctatgtgtttgatagtctccagctttctgtttgcctccatgaagtagcctattggtacatcttgtcaattggtgctcaaacagacttcctctccgtcttcttctccggctacacctttaagcacaagatggtgtatgaggacactctcacactctttccattttctggagaaaccgtgttcatgagcatggagaatccaggcctttggatcttgggttgccacaacagtgattttcgcaatcggggaatgactgctctcctcaaagtcagcagctgtgataagaacacaggcgactattacgaagattcttacgaggacataagtgcctacttgttgtccaagaataacgccattgagcccagatcattctcccagaatcctcccgtgcttaaaaggcatcagcgcgaaatcaccagaactactcttcagtctgatcaagaggagattgactatgacgacaccataagcgtggaaatgaagaaggaggatttcgatatctatgacgaagatgagaaccagtctccgcggagctttcagaagaagacgcgacactacttcattgcagcagtcgaaaggctttgggactacggtatgtcatcatcccctcatgtgttgcgcaatagagctcagagtggaagtgttccacagttcaagaaagtcgtctttcaagagtttacagatggcagcttcacacagcctctctatcggggcgagcttaacgaacatttgggactccttggtccctatatccgagccgaagtggaggacaacattatggttacctttaggaatcaagcctctcgcccctacagcttctactcctccctcatcagttatgaggaggatcagagacaaggcgctgaaccacggaagaactttgtgaaaccgaatgagacgaagacctacttctggaaagtacagcaccacatggcccccacaaaagacgaattcgattgcaaagcatgggcgtatttttcagacgttgacttggagaaagatgtacattcaggacttattggtcctttgttggtgtgtcacactaacactctcaatccagcccatggcaggcaggtgacagtccaggaattcgctcttttctttaccatctttgatgagaccaagtcctggtacttcacggaaaacatggagcgcaattgcagagccccctgtaacatacagatggaggaccctacctttaaggaaaattatcggttccacgcaatcaacggatacattatggatacactccctggccttgtgatggctcaggaccaacgaatcaggtggtacctcctcagcatgggttctaatgagaacatacactccattcacttttcaggacatgtgttcactgtccggaagaaagaagagtataagatggccctctacaatttgtatccaggcgtgtttgagaccgttgaaatgcttccctctaaagctggcatctggagagtagagtgcttgatcggagaacatcttcacgcaggtatgagcaccttgttcctcgtgtacagcaacaaatgtcagaccccacttggcatggccagtggacacattcgcgactttcagatcacagcatctggccagtatggacaatgggccccaaagttggctcgcctccattactccggtagcataaatgcgtggtccactaaagaacctttcagctggattaaggtcgatcttcttgcccccatgatcatccacggcattaagacacagggagcgaggcagaaattctcctccctctacatctcacagttcattattatgtatagtttggacggcaagaagtggcaaacttatagaggtaacagtactggaacactcatggtgttcttcggcaacgttgatagctctggcatcaaacacaacatctttaatcctcccataatagctcggtacatcagattgcatccgacccactacagcattaggagtacactccgaatggagcttatgggttgcgacttgaattcctgttcaatgccactcggaatggagtctaaagccatctctgatgcacagataaccgccagtagctactttacgaacatgtttgctacgtggtcaccctctaaggcaaggcttcatttgcaaggccggtctaatgcctggagacctcaggtgaacaacccgaaagaatggctccaggtggactttcagaagaccatgaaagtaacaggtgtcactactcagggagttaagtccttgctcaccagcatgtatgtgaaggagttccttatttcctcatcacaagatggccaccagtggaccctcttctttcagaatggtaaggtcaaagtgtttcagggcaatcaagacagcttcacacccgtggtgaacagtcttgatcctccactcttgacacgataccttcgaatccatccacagtcttgggttcaccagattgcattgcgcatggaagtacttggatgcgaggctcaggacctctac

SEQ ID NO: 2812 - protein, 1457 aa, synthetic construct
  REGION 1..1457: note = Variant of human B-domain deleted Factor VIII
MQIELSTCFFLCLLRFCFSATRRYYLGAVELSWDYMQSDLGELPVDARFPPRVPKSFPFNTSVVYKKTLFVEFTDHLFNIAKPRPPWMGLLGPTIQAEVYDTVVITLKNMASHPVSLHAVGVSYWKASEGAEYDDQTSQREKEDDKVFPGGSHTYVWQVLKENGPMASDPLCLTYSYLSHVDLVKDLNSGLIGALLVCREGSLAKEKTQTLHKFILLFAVFDEGKSWHSETKNSLMQDRDAASARAWPKMHTVNGYVNRSLPGLIGCHRKSVYWHVIGMGTTPEVHSIFLEGHTFLVRNHRQASLEISPITFLTAQTRLMDLGQFLLFCHISSHQHDGMEAYVKVDSCPEEPQLRMKNNEEAEDYDDDLTDSEMDVVRFDDDNSPSFIQIRSVAKKHPKTWVHYIAAEEEDWDYAPLVLAPDDRSYKSQYLNNGPQRIGRKYKKVRFMAYTDETFKTREAIQHESGILGPLLYGEVGDTLLIIFKNQASRPYNIYPHGITDVRPLYSRRLPKGVKHLKDFPILPGEIFKYKWTVTVEDGPTKSDPRCLTRYYSSFVNMERDLASGLIGPLLICYKESVDQRGNQIMSDKRNVILFSVFDENRSWYLTENIQRFLPNPAGVQLEDPEFQASNIMHSINGYVFDSLQLSVCLHEVAYWYILSIGAQTDFLSVFFSGYTFKHKMVYEDTLTLFPFSGETVFMSMENPGLWILGCHNSDFRNRGMTALLKVSSCDKNTGDYYEDSYEDISAYLLSKNNAIEPRSFSQNPPVLKRHQREITRTTLQSDQEEIDYDDTISVEMKKEDFDIYDEDENQSPRSFQKKTRHYFIAAVERLWDYGMSSSPHVLRNRAQSGSVPQFKKVVFQEFTDGSFTQPLYRGELNEHLGLLGPYIRAEVEDNIMVTFRNQASRPYSFYSSLISYEEDQRQGAEPRKNFVKPNETKTYFWKVQHHMAPTKDEFDCKAWAYFSDVDLEKDVHSGLIGPLLVCHTNTLNPAHGRQVTVQEFALFFTIFDETKSWYFTENMERNCRAPCNIQMEDPTFKENYRFHAINGYIMDTLPGLVMAQDQRIRWYLLSMGSNENIHSIHFSGHVFTVRKKEEYKMALYNLYPGVFETVEMLPSKAGIWRVECLIGEHLHAGMSTLFLVYSNKCQTPLGMASGHIRDFQITASGQYGQWAPKLARLHYSGSINAWSTKEPFSWIKVDLLAPMIIHGIKTQGARQKFSSLYISQFIIMYSLDGKKWQTYRGNSTGTLMVFFGNVDSSGIKHNIFNPPIIARYIRLHPTHYSIRSTLRMELMGCDLNSCSMPLGMESKAISDAQITASSYFTNMFATWSPSKARLHLQGRSNAWRPQVNNPKEWLQVDFQKTMKVTGVTTQGVKSLLTSMYVKEFLISSSQDGHQWTLFFQNGKVKVFQGNQDSFTPVVNSLDPPLLTRYLRIHPQSWVHQIALRMEVLGCEAQDLY

SEQ ID NO: 2813 - DNA, 4371 bp, synthetic construct
  misc_feature 1..4371: note = Variant of human B-domain deleted Factor VIII
  source 1..4371: mol_type = other DNA
atgcagattgaactgtctacctgcttcttcctctgtttgctgaggttctgctttagcgccactagacggtactaccttggcgctgtggagctgtcctgggactatatgcagagtgatttgggagagcttcccgtcgacgcacgatttcctcctcgcgttccaaagtcatttcccttcaacacaagcgtggtgtacaagaagacgctcttcgtcgaattcaccgatcacctgttcaatatcgccaaacccagaccaccatggatgggtcttttggggcctaccatacaagcggaggtgtatgacacagttgttatcactctcaagaacatggcttctcatccggtaagtcttcacgcagtgggcgtgtcctactggaaagcttcagaaggagccgagtatgatgatcagacatcccagagggagaaagaagacgacaaggtatttccaggtgggtctcatacctatgtgtggcaagtgctcaaagagaatggccctatggcaagcgatccgctctgtttgacttacagctacctttcacacgttgacctcgtcaaggacctcaactccgggttgattggagccttgttggtatgcagggaaggatctcttgccaaagagaagacacagaccctccacaagtttatccttctctttgctgtgttcgatgagggcaaaagttggcatagcgaaacgaagaattccctcatgcaggatcgcgacgcagccagcgccagagcttggcccaagatgcacactgtgaacggatatgtcaataggtcacttcctggcttgattgggtgtcatcggaaaagtgtctactggcacgtgatcggaatggggacaacaccagaggtccactccatatttctcgaaggccataccttccttgttcgaaaccacagacaggcatccttggagatctctcccattacctttctcactgcccaaacgctccttatggacttgggtcagttccttctcttctgccatatcagctcacaccagcatgatggtatggaagcttatgtgaaagtcgacagttgtcctgaggagccacagttgcgcatgaagaataatgaagaagccgaggattacgacgacgatctcaccgattctgagatggacgtggtgaggtttgatgacgacaactctccctccttcattcaaatccggagcgcggcgaagaaacaccccaagacttgggtccactatatagcggcggaagaggaggattgggattacgctcctcttgtattggcaccagatgaccgctcatacaaaagccagtacctcaacaacggaccgcagagaattggccggaagtataagaaagtgcgatttatggcctatacagacgaaacctttaagacaagggaggccatccagcatgagagtgggattttgggacctcttctttacggcgaagttggtgataccctcctcatcatcttcaagaatcaagcttctcgcccctataacatttacccacacgggatcactgacgttaggcctttgtatagcagaagacttcccaaaggcgtgaagcatctcaaagacttccccattttgccaggcgagatctttaagtacaaatggaccgtcacagtggaagatggaccgactaaatcagaccctcgatgccttacgcggtactattcctccttcgtgaatatggagagagatttggcaagcggactcataggaccactcctcatctgttacaaggaatctgtagaccagaggggtaaccagattatgagtgataaacgcaatgtgatcctttttagcgtcttcgacgagaaccggtcctggtacttgaccgagaatatacaaaggttccttcccaaccccgcaggcgttcagttggaagaccctgagtttcaggccagcaatattatgcactcaatcaacggctatgtgtttgatagtctccagctttctgtttgcctccatgaagtagcctattggtacatcttgtcaattggtgctcaaacagacttcctctccgtcttcttctccggctacacctttaagcacaagatggtgtatgaggacactctcacactctttccattttctggagaaaccgtgttcatgagcatggagaatccaggcctttggatcttgggttgccacaacagtgattttcgcaatcggggaatgactgctctcctcaaagtcagcagctgtgataagaacacaggcgactattacgaagattcttacgaggacataagtgcctacttgttgtccaagaataacgccattgagcccagatcattctcccagaatcctcccgtgcttaaaaggcatcagcgcgaaatcaccagaactactcttcagtctgatcaagaggagattgactatgacgacaccataagcgtggaaatgaagaaggaggatttcgatatctatgacgaagatgagaaccagtctccgcggagctttcagaagaagacgcgacactacttcattgcagcagtcgaaaggctttgggactacggtatgtcatcatcccctcatgtgttgcgcaatagagctcagagtggaagtgttccacagttcaagaaagtcgtctttcaagagtttacagatggcagcttcacacagcctctctatcggggcgagcttaacgaacatttgggactccttggtccctatatccgagccgaagtggaggacaacattatggttacctttaggaatcaagcctctcgcccctacagcttctactcctccctcatcagttatgaggaggatcagagacaaggcgctgaaccacggaagaactttgtgaaaccgaatgagacgaagacctacttctggaaagtacagcaccacatggcccccacaaaagacgaattcgattgcaaagcatgggcgtatttttcagacgttgacttggagaaagatgtacattcaggacttattggtcctttgttggtgtgtcacactaacactctcaatccagcccatggcaggcaggtgacagtccaggaattcgctcttttctttaccatctttgatgagaccaagtcctggtacttcacggaaaacatggagcgcaattgcagagccccctgtaacatacagatggaggaccctacctttaaggaaaattatcggttccacgcaatcaacggatacattatggatacactccctggccttgtgatggctcaggaccaacgaatcaggtggtacctcctcagcatgggttctaatgagaacatacactccattcacttttcaggacatgtgttcactgtccggaagaaagaagagtataagatggccctctacaatttgtatccaggcgtgtttgagaccgttgaaatgcttccctctaaagctggcatctggagagtagagtgcttgatcggagaacatcttcacgcaggtatgagcaccttgttcctcgtgtacagcaacaaatgtcagaccccacttggcatggccagtggacacattcgcgactttcagatcacagcatctggccagtatggacaatgggccccaaagttggctcgcctccattactccggtagcataaatgcgtggtccactaaagaacctttcagctggattaaggtcgatcttcttgcccccatgatcatccacggcattaagacacagggagcgaggcagaaattctcctccctctacatctcacagttcattattatgtatagtttggacggcaagaagtggcaaacttatagaggtaacagtactggaacactcatggtgttcttcggcaacgttgatagctctggcatcaaacacaacatctttaatcctcccataatagctcggtacatcagattgcatccgacccactacagcattaggagtacactccgaatggagcttatgggttgcgacttgaattcctgttcaatgccactcggaatggagtctaaagccatctctgatgcacagataaccgccagtagctactttacgaacatgtttgctacgtggtcaccctctaaggcaaggcttcatttgcaaggccggtctaatgcctggagacctcaggtgaacaacccgaaagaatggctccaggtggactttcagaagaccatgaaagtaacaggtgtcactactcagggagttaagtccttgctcaccagcatgtatgtgaaggagttccttatttcctcatcacaagatggccaccagtggaccctcttctttcagaatggtaaggtcaaagtgtttcagggcaatcaagacagcttcacacccgtggtgaacagtcttgatcctccactcttgacacgataccttcgaatccatccacagtcttgggttcaccagattgcattgcgcatggaagtacttggatgcgaggctcaggacctctac

SEQ ID NO: 2814 - protein, 1457 aa, synthetic construct
  REGION 1..1457: note = Variant of human B-domain deleted Factor VIII
MQIELSTCFFLCLLRFCFSATRRYYLGAVELSWDYMQSDLGELPVDARFPPRVPKSFPFNTSVVYKKTLFVEFTDHLFNIAKPRPPWMGLLGPTIQAEVYDTVVITLKNMASHPVSLHAVGVSYWKASEGAEYDDQTSQREKEDDKVFPGGSHTYVWQVLKENGPMASDPLCLTYSYLSHVDLVKDLNSGLIGALLVCREGSLAKEKTQTLHKFILLFAVFDEGKSWHSETKNSLMQDRDAASARAWPKMHTVNGYVNRSLPGLIGCHRKSVYWHVIGMGTTPEVHSIFLEGHTFLVRNHRQASLEISPITFLTAQTLLMDLGQFLLFCHISSHQHDGMEAYVKVDSCPEEPQLRMKNNEEAEDYDDDLTDSEMDVVRFDDDNSPSFIQIRSAAKKHPKTWVHYIAAEEEDWDYAPLVLAPDDRSYKSQYLNNGPQRIGRKYKKVRFMAYTDETFKTREAIQHESGILGPLLYGEVGDTLLIIFKNQASRPYNIYPHGITDVRPLYSRRLPKGVKHLKDFPILPGEIFKYKWTVTVEDGPTKSDPRCLTRYYSSFVNMERDLASGLIGPLLICYKESVDQRGNQIMSDKRNVILFSVFDENRSWYLTENIQRFLPNPAGVQLEDPEFQASNIMHSINGYVFDSLQLSVCLHEVAYWYILSIGAQTDFLSVFFSGYTFKHKMVYEDTLTLFPFSGETVFMSMENPGLWILGCHNSDFRNRGMTALLKVSSCDKNTGDYYEDSYEDISAYLLSKNNAIEPRSFSQNPPVLKRHQREITRTTLQSDQEEIDYDDTISVEMKKEDFDIYDEDENQSPRSFQKKTRHYFIAAVERLWDYGMSSSPHVLRNRAQSGSVPQFKKVVFQEFTDGSFTQPLYRGELNEHLGLLGPYIRAEVEDNIMVTFRNQASRPYSFYSSLISYEEDQRQGAEPRKNFVKPNETKTYFWKVQHHMAPTKDEFDCKAWAYFSDVDLEKDVHSGLIGPLLVCHTNTLNPAHGRQVTVQEFALFFTIFDETKSWYFTENMERNCRAPCNIQMEDPTFKENYRFHAINGYIMDTLPGLVMAQDQRIRWYLLSMGSNENIHSIHFSGHVFTVRKKEEYKMALYNLYPGVFETVEMLPSKAGIWRVECLIGEHLHAGMSTLFLVYSNKCQTPLGMASGHIRDFQITASGQYGQWAPKLARLHYSGSINAWSTKEPFSWIKVDLLAPMIIHGIKTQGARQKFSSLYISQFIIMYSLDGKKWQTYRGNSTGTLMVFFGNVDSSGIKHNIFNPPIIARYIRLHPTHYSIRSTLRMELMGCDLNSCSMPLGMESKAISDAQITASSYFTNMFATWSPSKARLHLQGRSNAWRPQVNNPKEWLQVDFQKTMKVTGVTTQGVKSLLTSMYVKEFLISSSQDGHQWTLFFQNGKVKVFQGNQDSFTPVVNSLDPPLLTRYLRIHPQSWVHQIALRMEVLGCEAQDLY

SEQ ID NO: 2815 - DNA, 4371 bp, synthetic construct
  misc_feature 1..4371: note = Variant of human B-domain deleted Factor VIII
  source 1..4371: mol_type = other DNA
atgcagattgaactgtctacctgcttcttcctctgtttgctgaggttctgctttagcgccactagacggtactaccttggcgctgtggagctgtcctgggactatatgcagagtgatttgggagagcttcccgtcgacgcacgatttcctcctcgcgttccaaagtcatttcccttcaacacaagcgtggtgtacaagaagacgctcttcgtcgaattcaccgatcacctgttcaatatcgccaaacccagaccaccatggatgggtcttttggggcctaccatacaagcggaggtgtatgacacagttgttatcactctcaagaacatggcttctcatccggtaagtcttcacgcagtgggcgtgtcctactggaaagcttcagaaggagccgagtatgatgatcagacatcccagagggagaaagaagacgacaaggtatttccaggtgggtctcatacctatgtgtggcaagtgctcaaagagaatggccctatggcaagcgatccggtttgtttgacttacagctacctttcacacgttgacctcgtcaaggacctcaactccgggttgattggagccttgttggtatgcagggaaggatctcttgccaaagagaagacacagaccctccacaagtttatccttctctttgctgtgttcgatgagggcaaaagttggcatagcgaaacgaagaattccctcatgcaggatcgcgacgcagccagcgccagagcttggcccaagatgcacactgtgaacggatatgtcaataggtcacttcctggcttgattgggtgtcatcggaaaagtgtctactggcacgtgatcggaatggggacaacaccagaggtccactccatatttctcgaaggccataccttccttgttcgaaaccacagacaggcatccttggagatctctcccattacctttctcactgcccaaacgctccttatggacttgggtcagttccttctcttctgccatatcagctcacaccagcatgatggtatggaagcttatgtgaaagtcgacagttgtcctgaggagccacagttgcgcatgaagaataatgaagaagccgaggattacgacgacgatctcaccgattctgagatggacgtggtgaggtttgatgacgacaactctccctccttcattcaaatccggagcgtggcgaagaaacaccccaagacttgggtccactatatagcggcggaagaggaggattgggattacgctcctcttgtattggcaccagatgaccgctcatacaaaagccagtacctcaacaacggaccgcagagaattggccggaagtataagaaagtgcgatttatggcctatacagacgaaacctttaagacaagggaggccatccagcatgagagtgggattttgggacctcttctttacggcgaagttggtgataccctcctcatcatcttcaagaatcaagcttctcgcccctataacatttacccacacgggatcactgacgttaggcctttgtatagcagaagacttcccaaaggcgtgaagcatctcaaagacttccccattttgccaggcgagatctttaagtacaaatggaccgtcacagtggaagatggaccgactaaatcagaccctcgatgccttacgcggtactattcctccttcgtgaatatggagagagatttggcaagcggactcataggaccactcctcatctgttacaaggaatctgtagaccagaggggtaaccagattatgagtgataaacgcaatgtgatcctttttagcgtcttcgacgagaaccggtcctggtacttgaccgagaatatacaaaggttccttcccaaccccgcaggcgttcagttggaagaccctgagtttcaggccagcaatattatgcactcaatcaacggctatgtgtttgatagtctccagctttctgtttgcctccatgaagtagcctattggtacatcttgtcaattggtgctcaaacagacttcctctccgtcttcttctccggctacacctttaagcacaagatggtgtatgaggacactctcacactctttccattttctggagaaaccgtgttcatgagcatggagaatccaggcctttggatcttgggttgccacaacagtgattttcgcaatcggggaatgactgctctcctcaaagtcagcagctgtgataagaacacaggcgactattacgaagattcttacgaggacataagtgcctacttgttgtccaagaataacgccattgagcccagatcattctcccagaatcctcccgtgcttaaaaggcatcagcgcgaaatcaccagaactactcttcagtctgatcaagaggagattgactatgacgacaccataagcgtggaaatgaagaaggaggatttcgatatctatgacgaagatgagaaccagtctccgcggagctttcagaagaagacgcgacactacttcattgcagcagtcgaaaggctttgggactacggtatgtcatcatcccctcatgtgttgcgcaatagagctcagagtggaagtgttccacagttcaagaaagtcgtctttcaagagtttacagatggcagcttcacacagcctctctatcggggcgagcttaacgaacatttgggactccttggtccctatatccgagccgaagtggaggacaacattatggttacctttaggaatcaagcctctcgcccctacagcttctactcctccctcatcagttatgaggaggatcagagacaaggcgctgaaccacggaagaactttgtgaaaccgaatgagacgaagacctacttctggaaagtacagcaccacatggcccccacaaaagacgaattcgattgcaaagcatgggcgtatttttcagacgttgacttggagaaagatgtacattcaggacttattggtcctttgttggtgtgtcacactaacactctcaatccagcccatggcaggcaggtgacagtccaggaattcgctcttttctttaccatctttgatgagaccaagtcctggtacttcacggaaaacatggagcgcaattgcagagccccctgtaacatacagatggaggaccctacctttaaggaaaattatcggttccacgcaatcaacggatacattatggatacactccctggccttgtgatggctcaggaccaacgaatcaggtggtacctcctcagcatgggttctaatgagaacatacactccattcacttttcaggacatgtgttcactgtccggaagaaagaagagtataagatggccctctacaatttgtatccaggcgtgtttgagaccgttgaaatgcttccctctaaagctggcatctggagagtagagtgcttgatcggagaacatcttcacgcaggtatgagcaccttgttcctcgtgtacagcaacaaatgtcagaccccacttggcatggccagtggacacattcgcgactttcagatcacagcatctggccagtatggacaatgggccccaaagttggctcgcctccattactccggtagcataaatgcgtggtccactaaagaacctttcagctggattaaggtcgatcttcttgcccccatgatcatccacggcattaagacacagggagcgaggcagaaattctcctccctctacatctcacagttcattattatgtatagtttggacggcaagaagtggcaaacttatagaggtaacagtactggaacactcatggtgttcttcggcaacgttgatagctctggcatcaaacacaacatctttaatcctcccataatagctcggtacatcagattgcatccgacccactacagcattaggagtacactccgaatggagcttatgggttgcgacttgaattcctgttcaatgccactcggaatggagtctaaagccatctctgatgcacagataaccgccagtagctactttacgaacatgtttgctacgtggtcaccctctaaggcaaggcttcatttgcaaggccggtctaatgcctggagacctcaggtgaacaacccgaaagaatggctccaggtggactttcagaagaccatgaaagtaacaggtgtcactactcagggagttaagtccttgctcaccagcatgtatgtgaaggagttccttatttcctcatcacaagatggccaccagtggaccctcttctttcagaatggtaaggtcaaagtgtttcagggcaatcaagacagcttcacacccgtggtgaacagtcttgatcctccactcttgacacgataccttcgaatccatccacagtcttgggttcaccagattgcattgcgcatggaagtacttggatgcgaggctcaggacctctac

SEQ ID NO: 2816 - protein, 1457 aa, synthetic construct
  REGION 1..1457: note = Variant of human B-domain deleted Factor VIII
MQIELSTCFFLCLLRFCFSATRRYYLGAVELSWDYMQSDLGELPVDARFPPRVPKSFPFNTSVVYKKTLFVEFTDHLFNIAKPRPPWMGLLGPTIQAEVYDTVVITLKNMASHPVSLHAVGVSYWKASEGAEYDDQTSQREKEDDKVFPGGSHTYVWQVLKENGPMASDPVCLTYSYLSHVDLVKDLNSGLIGALLVCREGSLAKEKTQTLHKFILLFAVFDEGKSWHSETKNSLMQDRDAASARAWPKMHTVNGYVNRSLPGLIGCHRKSVYWHVIGMGTTPEVHSIFLEGHTFLVRNHRQASLEISPITFLTAQTLLMDLGQFLLFCHISSHQHDGMEAYVKVDSCPEEPQLRMKNNEEAEDYDDDLTDSEMDVVRFDDDNSPSFIQIRSVAKKHPKTWVHYIAAEEEDWDYAPLVLAPDDRSYKSQYLNNGPQRIGRKYKKVRFMAYTDETFKTREAIQHESGILGPLLYGEVGDTLLIIFKNQASRPYNIYPHGITDVRPLYSRRLPKGVKHLKDFPILPGEIFKYKWTVTVEDGPTKSDPRCLTRYYSSFVNMERDLASGLIGPLLICYKESVDQRGNQIMSDKRNVILFSVFDENRSWYLTENIQRFLPNPAGVQLEDPEFQASNIMHSINGYVFDSLQLSVCLHEVAYWYILSIGAQTDFLSVFFSGYTFKHKMVYEDTLTLFPFSGETVFMSMENPGLWILGCHNSDFRNRGMTALLKVSSCDKNTGDYYEDSYEDISAYLLSKNNAIEPRSFSQNPPVLKRHQREITRTTLQSDQEEIDYDDTISVEMKKEDFDIYDEDENQSPRSFQKKTRHYFIAAVERLWDYGMSSSPHVLRNRAQSGSVPQFKKVVFQEFTDGSFTQPLYRGELNEHLGLLGPYIRAEVEDNIMVTFRNQASRPYSFYSSLISYEEDQRQGAEPRKNFVKPNETKTYFWKVQHHMAPTKDEFDCKAWAYFSDVDLEKDVHSGLIGPLLVCHTNTLNPAHGRQVTVQEFALFFTIFDETKSWYFTENMERNCRAPCNIQMEDPTFKENYRFHAINGYIMDTLPGLVMAQDQRIRWYLLSMGSNENIHSIHFSGHVFTVRKKEEYKMALYNLYPGVFETVEMLPSKAGIWRVECLIGEHLHAGMSTLFLVYSNKCQTPLGMASGHIRDFQITASGQYGQWAPKLARLHYSGSINAWSTKEPFSWIKVDLLAPMIIHGIKTQGARQKFSSLYISQFIIMYSLDGKKWQTYRGNSTGTLMVFFGNVDSSGIKHNIFNPPIIARYIRLHPTHYSIRSTLRMELMGCDLNSCSMPLGMESKAISDAQITASSYFTNMFATWSPSKARLHLQGRSNAWRPQVNNPKEWLQVDFQKTMKVTGVTTQGVKSLLTSMYVKEFLISSSQDGHQWTLFFQNGKVKVFQGNQDSFTPVVNSLDPPLLTRYLRIHPQSWVHQIALRMEVLGCEAQDLY

SEQ ID NO: 2817 - DNA, 4371 bp, synthetic construct
  misc_feature 1..4371: note = Variant of human B-domain deleted Factor VIII
  source 1..4371: mol_type = other DNA
atgcagattgaactgtctacctgcttcttcctctgtttgctgaggttctgctttagcgccactagacggtactaccttggcgctgtggagctgtcctgggactatatgcagagtgatttgggagagcttcccgtcgacgcacgatttcctcctcgcgttccaaagtcatttcccttcaacacaagcgtggtgtacaagaagacgctcttcgtcgaattcaccgatcacctgttcaatatcgccaaacccagaccaccatggatgggtcttttggggcctaccatacaagcggaggtgtatgacacagttgttatcactctcaagaacatggcttctcatccggtaagtcttcacgcagtgggcgtgtcctactggaaagcttcagaaggagccgagtatgatgatcagacatcccagagggagaaagaagacgacaaggtatttccaggtgggtctcatacctatgtgtggcaagtgctcaaagagaatggccctatggcaagcgatccgctctgtttgacttacagctacctttcacacgttgacctcgtcaaggacctcaactccgggttgattggagccttgttggtatgcagggaaggatctcttgccaaagagaagacacagaccctccacaagtttatccttctctttgctgtgttcgatgagggcaaaagttggcatagcgaaacgaagaattccctcatgcaggatcgcgacgcagccagcgccagagcttggcccaagatgcacactgtgaacggatatgtcaataggtcacttcctggcttgattgggtgtcatcggaaaagtgtctactggcacgtgatcggaatggggacaacaccagaggtccactccatatttctcgaaggccataccttccttgttcgaaaccacagacaggcatccttggagatctctcccattacctttctcactgcccaaacgctccttatggacttgggtcagttccttctcttctgccatatcagctcacaccagcatgatggtatggaagcttatgtgaaagtcgacagttgtcctgaggagccacagttgcgcatgaagaataatgaagaagccgaggattacgacgacgatctcaccgattctgagatggacgtggtgaggtttgatgacgacaactctccctccttcattcaaatccggagcgtggcgaagaaacaccccaagacttgggtccactatatagcggcggaagaggaggattgggattacgctcctcttgtattggcaccagatgaccgctcatacaaaagccagtacctcaacaacggaccgcagagaattggccggaagtataagaaagtgcgatttatggcctatacagacgaaacctttaagacaagggaggccatccagcatgagagtgggattttgggacctcttctttacggcgaagttggtgataccctcctcatcatcttcaagaatcaagcttctcgcccctataacatttacccacacgggatcactgacgttaggcctttgtatagcagaagacttcccaaaggcgtgaagcatctcaaagacttccccattttgccaggcgagatctttaagtacaaatggaccgtcacagtggaagatggaccgactaaatcagaccctcgatgccttacgcggtactattcctccttcgtgaatatggagagagatttggcaagcggactcataggaccactcctcatctgttacaaggaatctgtagaccagaggggtaaccagattatgagtgataaacgcaatgtgatcctttttagcgtcttcgacgagaaccggtcctggtacttgaccgagaatatacaaaggttccttcccaaccccgcaggcgttcagttggaagaccctgagtttcaggccagcaatattatgcactcaatcaacggctatgtgtttgatagtctccagctttctgtttgcctccatgaagtagcctattggtacatcttgtcaattggtgctcaaacagacttcctctccgtcttcttctccggctacacctttaagcacaagatggtgtatgaggacactctcacactctttccattttctggagaaaccgtgttcatgagcatggagaatccaggcctttggatcttgggttgccacaacagtgattttcgcaatcggggaatgactgctctcctcaaagtcagcagctgtgataagaacacaggcgactattacgaagattcttacgaggacataagtgcctacttgttgtccaagaataacgccattgagcccagatcattctcccagaatcctcccgtgcttaaaaggcatcagcgcgaaatcaccagaactactcttcagtctgatcaagaggagattgactatgacgacaccataagcgtggaaatgaagaaggaggatttcgatatctatgacgaagatgagaaccagtctccgcggagctttcagaagaagacgcgacactacttcattgcagcagtcgaaaggctttgggactacggtatgtcatcatcccctcatgtgttgcgcaatagagctcagagtggaagtgttccacagttcaagaaagtcgtctttcaagagtttacagatggcagcttcacacagcctctctatcggggcgagcttaacgaacatttgggactccttggtccctatatccgagccgaagtggaggacaacattatggttacctttaggaatcaagcctctcgcccctacagcttctactcctccctcatcagttatgaggaggatcagagacaaggcgctgaaccacggaagaactttgtgaaaccgaatgagacgaagacctacttctggaaagtacagcaccacatggcccccacaaaagacgaattcgattgcaaagcatgggcgtatttttcagacgttgacttggagaaagatgtacattcaggacttattggtcctttgttggtgtgtcacactaacactctcaatccagcccatggcaggcaggtgacagtccaggaattcgctcttttctttaccatctttgatgagaccaagtcctggtacttcacggaaaacatggagcgcaattgcagagccccctgtaacatacagatggaggaccctacctttaaggaaaattatcggttccacgcaatcaacggatacattatggatacactccctggccttgtgatggctcaggaccaacgaatcaggtggtacctcctcagcatgggttctaatgagaacatacactccattcacttttcaggacatgtgttcactgtccggaagaaagaagagtataagatggccctctacaatttgtatccaggcgtgtttgagaccgttgaaatgcttccctctaaagctggcatctggagagtagagtgcttgatcggagaacatcttcacgcaggtatgagcaccttgttcctcgtgtacagcaacaaatgtcagaccccacttggcatggccagtggacacattcgcgactttcagatcacagcatctggccagtatggacaatgggccccaaagttggctcgcctccattactccggtagcataaatgcgtggtccactaaagaacctttcagctggattaaggtcgatcttcttgcccccatgatcatccacggcattaagacacagggagcgaggcagaaattctcctccctctacatctcacagttcattattatgtatagtttggacggcaagaagtggcaaacttatagaggtaacagtactggaacactcatggtgttcttcggcaacgttgatagctctggcatcaaacacaacatctttaatcctcccataatagctcggtacatcagattgcatccgacccactacagcattaggagtacactccgaatggagcttatgggttgcgacttgaattcctgttcaatgccactcggaatggagtctaaagccatctctgatgcacagataaccgccagtagctactttacgaacatgtttgctacgtggtcaccctctaaggcaaggcttcatttgcaaggccggtctaatgcctggagacctcaggtgaacaacccgaaagaatggctccaggtggactttcagaagaccatgaaagtaacaggtgtcactactcagggagttaagtccttgctcaccagcatgtatgtgaaggagttccttatttcctcatcacaagatggccaccagtggaccctcttctttcagaatggtaaggtcaaagtgtttcagggcaatcaagacagcttcacacccgtggtgaacagtcttgatcctccactcttgacacgataccttcgaatccatccacagtcttgggagcaccagattgcattgcgcatggaagtacttggatgcgaggctcaggacctctac

SEQ ID NO: 2818 - protein, 1457 aa, synthetic construct
  REGION 1..1457: note = Variant of human B-domain deleted Factor VIII
MQIELSTCFFLCLLRFCFSATRRYYLGAVELSWDYMQSDLGELPVDARFPPRVPKSFPFNTSVVYKKTLFVEFTDHLFNIAKPRPPWMGLLGPTIQAEVYDTVVITLKNMASHPVSLHAVGVSYWKASEGAEYDDQTSQREKEDDKVFPGGSHTYVWQVLKENGPMASDPLCLTYSYLSHVDLVKDLNSGLIGALLVCREGSLAKEKTQTLHKFILLFAVFDEGKSWHSETKNSLMQDRDAASARAWPKMHTVNGYVNRSLPGLIGCHRKSVYWHVIGMGTTPEVHSIFLEGHTFLVRNHRQASLEISPITFLTAQTLLMDLGQFLLFCHISSHQHDGMEAYVKVDSCPEEPQLRMKNNEEAEDYDDDLTDSEMDVVRFDDDNSPSFIQIRSVAKKHPKTWVHYIAAEEEDWDYAPLVLAPDDRSYKSQYLNNGPQRIGRKYKKVRFMAYTDETFKTREAIQHESGILGPLLYGEVGDTLLIIFKNQASRPYNIYPHGITDVRPLYSRRLPKGVKHLKDFPILPGEIFKYKWTVTVEDGPTKSDPRCLTRYYSSFVNMERDLASGLIGPLLICYKESVDQRGNQIMSDKRNVILFSVFDENRSWYLTENIQRFLPNPAGVQLEDPEFQASNIMHSINGYVFDSLQLSVCLHEVAYWYILSIGAQTDFLSVFFSGYTFKHKMVYEDTLTLFPFSGETVFMSMENPGLWILGCHNSDFRNRGMTALLKVSSCDKNTGDYYEDSYEDISAYLLSKNNAIEPRSFSQNPPVLKRHQREITRTTLQSDQEEIDYDDTISVEMKKEDFDIYDEDENQSPRSFQKKTRHYFIAAVERLWDYGMSSSPHVLRNRAQSGSVPQFKKVVFQEFTDGSFTQPLYRGELNEHLGLLGPYIRAEVEDNIMVTFRNQASRPYSFYSSLISYEEDQRQGAEPRKNFVKPNETKTYFWKVQHHMAPTKDEFDCKAWAYFSDVDLEKDVHSGLIGPLLVCHTNTLNPAHGRQVTVQEFALFFTIFDETKSWYFTENMERNCRAPCNIQMEDPTFKENYRFHAINGYIMDTLPGLVMAQDQRIRWYLLSMGSNENIHSIHFSGHVFTVRKKEEYKMALYNLYPGVFETVEMLPSKAGIWRVECLIGEHLHAGMSTLFLVYSNKCQTPLGMASGHIRDFQITASGQYGQWAPKLARLHYSGSINAWSTKEPFSWIKVDLLAPMIIHGIKTQGARQKFSSLYISQFIIMYSLDGKKWQTYRGNSTGTLMVFFGNVDSSGIKHNIFNPPIIARYIRLHPTHYSIRSTLRMELMGCDLNSCSMPLGMESKAISDAQITASSYFTNMFATWSPSKARLHLQGRSNAWRPQVNNPKEWLQVDFQKTMKVTGVTTQGVKSLLTSMYVKEFLISSSQDGHQWTLFFQNGKVKVFQGNQDSFTPVVNSLDPPLLTRYLRIHPQSWEHQIALRMEVLGCEAQDLY

SEQ ID NO: 2819 - DNA, 4371 bp, synthetic construct
  misc_feature 1..4371: note = Variant of human B-domain deleted Factor VIII
  source 1..4371: mol_type = other DNA
atgcagattgaactgtctacctgcttcttcctctgtttgctgaggttctgctttagcgccactagacggtactaccttggcgctgtggagctgtcctgggactatatgcagagtgatttgggagagcttcccgtcgacgcacgatttcctcctcgcgttccaaagtcatttcccttcaacacaagcgtggtgtacaagaagacgctcttcgtcgaattcaccgatcacctgttcaatatcgccaaacccagaccaccatggatgggtcttttggggcctaccatacaagcggaggtgtatgacacagttgttatcactctcaagaacatggcttctcatccggtaagtcttcacgcagtgggcgtgtcctactggaaagcttcagaaggagccgagtatgatgatcagacatcccagagggagaaagaagacgacaaggtatttccaggtgggtctcatacctatgtgtggcaagtgctcaaagagaatggccctatggcaagcgatccgctctgtttgacttacagctacctttcacacgttgacctcgtcaaggacctcaactccgggttgattggagccttgttggtatgcagggaaggatctcttgccaaagagaagacacagaccctccacaagtttatccttctctttgctgtgttcgatgagggcaaaagttggcatagcgaaacgaagaattccctcatgcaggatcgcgacgcagccagcgccagagcttggcccaagatgcacactgtgaacggatatgtcaataggtcacttcctggcttgattgggtgtcatcggaaaagtgtctactggcacgtgatcggaatggggacaacaccagaggtccactccatatttctcgaaggccataccttccttgttcgaaaccacagacaggcatccttggagatctctcccattacctttctcactgcccaaacgctccttatggacttgggtcagttccttctcttctgccatatcagctcacaccagcatgatggtatggaagcttatgtgaaagtcgacagttgtcctgaggagccacagttgcgcatgaagaataatgaagaagccgaggattacgacgacgatctcaccgattctgagatggacgtggtgaggtttgatgacgacaactctccctccttcattcaaatccggagcgtggcgaagaaacaccccaagacttgggtccactatatagcggcggaagaggaggattgggattacgctcctcttgtattggcaccagatgaccgctcatacaaaagccagtacctcaacaacggaccgcagagaattggccggaagtataagaaagtgcgatttatggcctatacagacgaaacctttaagacaagggaggccatccagcatgagagtgggattttgggacctcttctttacggcgaagttggtgataccctcctcatcatcttcaagaatcaagcttctcgcccctataacatttacccacacgggatcactgacgttaggcctttgtatagcagaagacttcccaaaggcgtgaagcatctcaaagacttccccattttgccaggcgagatctttaagtacaaatggaccgtcacagtggaagatggaccgactaaatcagaccctcgatgccttacgcggtactattcctccttcgtgaatatggagagagatttggcaagcggactcataggaccactcctcatctgttacaaggaatctgtagaccagaggggtaaccagattatgagtgataaacgcaatgtgatcctttttagcgtcttcgacgagaaccggtcctggtacttgaccgagaatatacaaaggttccttcccaaccccgcaggcgttcagttggaagaccctgagtttcaggccagcaatattatgcactcaatcaacggctatgtgtttgatagtctccagctttctgtttgcctccatgaagtagcctattggtacatcttgtcaattggtgctcaaacagacttcctctccgtcttcttctccggctacacctttaagcacaagatggtgtatgaggacactctcacactctttccattttctggagaaaccgtgttcatgagcatggagaatccaggcctttggatcttgggttgccacaacagtgattttcgcaatcggggaatgactgctctcctcaaagtcagcagctgtgataagaacacaggcgactattacgaagattcttacgaggacataagtgcctacttgttgtccaagaataacgccattgagcccagatcattctcccagaatcctcccgtgcttaaaaggcatcagcgcgaaatcaccagaactactcttcagtctgatcaagaggagattgactatgacgacaccataagcgtggaaatgaagaaggaggatttcgatatctatgacgaagatgagaaccagtctccgcggagctttcagaagaagacgcgacactacttcattgcagcagtcgaaaggctttgggactacggtatgtcatcatcccctcatgtgttgcgcaatagagctcagagtggaagtgttccacagttcaagaaagtcgtctttcaagagtttacagatggcagcttcacacagcctctctatcggggcgagcttaacgaacatttgggactccttggtccctatatccgagccgaagtggaggacaacattatggttacctttaggaatcaagcctctcgcccctacagcttctactcctccctcatcagttatgaggaggatcagagacaaggcgctgaaccacggaagaactttgtgaaaccgaatgagacgaagacctacttctggaaagtacagcaccacatggcccccacaaaagacgaattcgattgcaaagcatgggcgtatttttcagacgttgacttggagaaagatgtacattcaggacttattggtcctttgttggtgtgtcacactaacactctcaatccagcccatggcaggcaggtgacagtccaggaattcgctcttttctttaccatctttgatgagaccaagtcctggtacttcacggaaaacatggagcgcaattgcagagccccctgtaacatacagatggaggaccctacctttaaggaaaattatcggttccacgcaatcaacggatacattatggatacactccctggccttgtgatggctcaggaccaacgaatcaggtggtacctcctcagcatgggttctaatgagaacatacactccattcacttttcaggacatgtgttcactgtccggaagaaagaagagtataagatggccctctacaatttgtatccaggcgtgtttgagaccgttgaaatgcttccctctaaagctggcatctggagagtagagtgcttgatcggagaacatcttcacgcaggtatgagcaccttgttcctcgtgtacagcaacaaatgtcagaccccacttggcatggccagtggacacattcgcgactttcagatcacagcatctggccagtatggacaatgggccccaaagttggctcgcctccattactccggtagcataaatgcgtggtccactaaagaacctttcagctggattaaggtcgatcttcttgcccccatgatcatccacggcattaagacacagggagcgaggcagaaattctcctccctctacatctcacagttcattattatgtatagtttggacggcaagaagtggcaaacttatagaggtaacagtactggaacatatatggtgttcttcggcaacgttgatagctctggcatcaaacacaacatctttaatcctcccataatagctcggtacatcagattgcatccgacccactacagcattaggagtacactccgaatggagcttatgggttgcgacttgaattcctgttcaatgccactcggaatggagtctaaagccatctctgatgcacagataaccgccagtagctactttacgaacatgtttgctacgtggtcaccctctaaggcaaggcttcatttgcaaggccggtctaatgcctggagacctcaggtgaacaacccgaaagaatggctccaggtggactttcagaagaccatgaaagtaacaggtgtcactactcagggagttaagtccttgctcaccagcatgtatgtgaaggagttccttatttcctcatcacaagatggccaccagtggaccctcttctttcagaatggtaaggtcaaagtgtttcagggcaatcaagacagcttcacacccgtggtgaacagtcttgatcctccactcttgacacgataccttcgaatccatccacagtcttgggttcaccagattgcattgcgcatggaagtacttggatgcgaggctcaggacctctac

SEQ ID NO: 2820 - protein, 1457 aa, synthetic construct
  REGION 1..1457: note = Variant of human B-domain deleted Factor VIII
MQIELSTCFFLCLLRFCFSATRRYYLGAVELSWDYMQSDLGELPVDARFPPRVPKSFPFNTSVVYKKTLFVEFTDHLFNIAKPRPPWMGLLGPTIQAEVYDTVVITLKNMASHPVSLHAVGVSYWKASEGAEYDDQTSQREKEDDKVFPGGSHTYVWQVLKENGPMASDPLCLTYSYLSHVDLVKDLNSGLIGALLVCREGSLAKEKTQTLHKFILLFAVFDEGKSWHSETKNSLMQDRDAASARAWPKMHTVNGYVNRSLPGLIGCHRKSVYWHVIGMGTTPEVHSIFLEGHTFLVRNHRQASLEISPITFLTAQTLLMDLGQFLLFCHISSHQHDGMEAYVKVDSCPEEPQLRMKNNEEAEDYDDDLTDSEMDVVRFDDDNSPSFIQIRSVAKKHPKTWVHYIAAEEEDWDYAPLVLAPDDRSYKSQYLNNGPQRIGRKYKKVRFMAYTDETFKTREAIQHESGILGPLLYGEVGDTLLIIFKNQASRPYNIYPHGITDVRPLYSRRLPKGVKHLKDFPILPGEIFKYKWTVTVEDGPTKSDPRCLTRYYSSFVNMERDLASGLIGPLLICYKESVDQRGNQIMSDKRNVILFSVFDENRSWYLTENIQRFLPNPAGVQLEDPEFQASNIMHSINGYVFDSLQLSVCLHEVAYWYILSIGAQTDFLSVFFSGYTFKHKMVYEDTLTLFPFSGETVFMSMENPGLWILGCHNSDFRNRGMTALLKVSSCDKNTGDYYEDSYEDISAYLLSKNNAIEPRSFSQNPPVLKRHQREITRTTLQSDQEEIDYDDTISVEMKKEDFDIYDEDENQSPRSFQKKTRHYFIAAVERLWDYGMSSSPHVLRNRAQSGSVPQFKKVVFQEFTDGSFTQPLYRGELNEHLGLLGPYIRAEVEDNIMVTFRNQASRPYSFYSSLISYEEDQRQGAEPRKNFVKPNETKTYFWKVQHHMAPTKDEFDCKAWAYFSDVDLEKDVHSGLIGPLLVCHTNTLNPAHGRQVTVQEFALFFTIFDETKSWYFTENMERNCRAPCNIQMEDPTFKENYRFHAINGYIMDTLPGLVMAQDQRIRWYLLSMGSNENIHSIHFSGHVFTVRKKEEYKMALYNLYPGVFETVEMLPSKAGIWRVECLIGEHLHAGMSTLFLVYSNKCQTPLGMASGHIRDFQITASGQYGQWAPKLARLHYSGSINAWSTKEPFSWIKVDLLAPMIIHGIKTQGARQKFSSLYISQFIIMYSLDGKKWQTYRGNSTGTYMVFFGNVDSSGIKHNIFNPPIIARYIRLHPTHYSIRSTLRMELMGCDLNSCSMPLGMESKAISDAQITASSYFTNMFATWSPSKARLHLQGRSNAWRPQVNNPKEWLQVDFQKTMKVTGVTTQGVKSLLTSMYVKEFLISSSQDGHQWTLFFQNGKVKVFQGNQDSFTPVVNSLDPPLLTRYLRIHPQSWVHQIALRMEVLGCEAQDLY

SEQ ID NO: 2821 - DNA, 4371 bp, synthetic construct
  misc_feature 1..4371: note = Variant of human B-domain deleted Factor VIII
  source 1..4371: mol_type = other DNA
atgcagattgaactgtctacctgcttcttcctctgtttgctgaggttctgctttagcgccactagacggtactaccttggcgctgtggagctgtcctgggactatatgcagagtgatttgggagagcttcccgtcgacgcacgatttcctcctcgcgttccaaagtcatttcccttcaacacaagcgtggtgtacaagaagacgctcttcgtcgaattcaccgatcacctgttcaatatcgccaaacccagaccaccatggatgggtcttttggggcctaccatacaagcggaggtgtatgacacagttgttatcactctcaagaacatggcttctcatccggtaagtcttcacgcagtgggcgtgtcctactggaaagcttcagaaggagccgagtatgatgatcagacatcccagagggagaaagaagacgacaaggtatttccaggtgggtctcatacctatgtgtggcaagtgctcaaagagaatggccctatggcaagcgatccgctctgtttgacttacagctacctttcacacgttgacctcgtcaaggacctcaactccgggttgattggagccttgttggtatgcagggaaggatctcttgccaaagagaagacacagaccctccacaagtttatccttctctttgctgtgttcgatgagggcaaaagttggcatagcgaaacgaagaattccctcatgcaggatcgcgacgcagccagcgccagagcttggcccaagatgcacactgtgaacggatatgtcaataggtcacttcctggcttgattgggtgtcatcggaaaagtgtctactggcacgtgatcggaatggggacaacaccagaggtccactccatatttctcgaaggccataccttccttgttcgaaaccacagacaggcatccttggagatctctcccattacctttctcactgcccaaacgctccttatggacttgggtcagttccttctcttctgccatatcacgtcacaccagcatgatggtatggaagcttatgtgaaagtcgacagttgtcctgaggagccacagttgcgcatgaagaataatgaagaagccgaggattacgacgacgatctcaccgattctgagatggacgtggtgaggtttgatgacgacaactctccctccttcattcaaatccggagcgtggcgaagaaacaccccaagacttgggtccactatatagcggcggaagaggaggattgggattacgctcctcttgtattggcaccagatgaccgctcatacaaaagccagtacctcaacaacggaccgcagagaattggccggaagtataagaaagtgcgatttatggcctatacagacgaaacctttaagacaagggaggccatccagcatgagagtgggattttgggacctcttctttacggcgaagttggtgataccctcctcatcatcttcaagaatcaagcttctcgcccctataacatttacccacacgggatcactgacgttaggcctttgtatagcagaagacttcccaaaggcgtgaagcatctcaaagacttccccattttgccaggcgagatctttaagtacaaatggaccgtcacagtggaagatggaccgactaaatcagaccctcgatgccttacgcggtactattcctccttcgtgaatatggagagagatttggcaagcggactcataggaccactcctcatctgttacaaggaatctgtagaccagaggggtaaccagattatgagtgataaacgcaatgtgatcctttttagcgtcttcgacgagaaccggtcctggtacttgaccgagaatatacaaaggttccttcccaaccccgcaggcgttcagttggaagaccctgagtttcaggccagcaatattatgcactcaatcaacggctatgtgtttgatagtctccagctttctgtttgcctccatgaagtagcctattggtacatcttgtcaattggtgctcaaacagacttcctctccgtcttcttctccggctacacctttaagcacaagatggtgtatgaggacactctcacactctttccattttctggagaaaccgtgttcatgagcatggagaatccaggcctttggatcttgggttgccacaacagtgattttcgcaatcggggaatgactgctctcctcaaagtcagcagctgtgataagaacacaggcgactattacgaagattcttacgaggacataagtgcctacttgttgtccaagaataacgccattgagcccagatcattctcccagaatcctcccgtgcttaaaaggcatcagcgcgaaatcaccagaactactcttcagtctgatcaagaggagattgactatgacgacaccataagcgtggaaatgaagaaggaggatttcgatatctatgacgaagatgagaaccagtctccgcggagctttcagaagaagacgcgacactacttcattgcagcagtcgaaaggctttgggactacggtatgtcatcatcccctcatgtgttgcgcaatagagctcagagtggaagtgttccacagttcaagaaagtcgtctttcaagagtttacagatggcagcttcacacagcctctctatcggggcgagcttaacgaacatttgggactccttggtccctatatccgagccgaagtggaggacaacattatggttacctttaggaatcaagcctctcgcccctacagcttctactcctccctcatcagttatgaggaggatcagagacaaggcgctgaaccacggaagaactttgtgaaaccgaatgagacgaagacctacttctggaaagtacagcaccacatggcccccacaaaagacgaattcgattgcaaagcatgggcgtatttttcagacgttgacttggagaaagatgtacattcaggacttattggtcctttgttggtgtgtcacactaacactctcaatccagcccatggcaggcaggtgacagtccaggaattcgctcttttctttaccatctttgatgagaccaagtcctggtacttcacggaaaacatggagcgcaattgcagagccccctgtaacatacagatggaggaccctacctttaaggaaaattatcggttccacgcaatcaacggatacattatggatacactccctggccttgtgatggctcaggaccaacgaatcaggtggtacctcctcagcatgggttctaatgagaacatacactccattcacttttcaggacatgtgttcactgtccggaagaaagaagagtataagatggccctctacaatttgtatccaggcgtgtttgagaccgttgaaatgcttccctctaaagctggcatctggagagtagagtgcttgatcggagaacatcttcacgcaggtatgagcaccttgttcctcgtgtacagcaacaaatgtcagaccccacttggcatggccagtggacacattcgcgactttcagatcacagcatctggccagtatggacaatgggccccaaagttggctcgcctccattactccggtagcataaatgcgtggtccactaaagaacctttcagctggattaaggtcgatcttcttgcccccatgatcatccacggcattaagacacagggagcgaggcagaaattctcctccctctacatctcacagttcattattatgtatagtttggacggcaagaagtggcaaacttatagaggtaacagtactggaacactcatggtgttcttcggcaacgttgatagctctggcatcaaacacaacatctttaatcctcccataatagctcggtacatcagattgcatccgacccactacagcattaggagtacactccgaatggagcttatgggttgcgacttgaattcctgttcaatgccactcggaatggagtctaaagccatctctgatgcacagataaccgccagtagctactttacgaacatgtttgctacgtggtcaccctctaaggcaaggcttcatttgcaaggccggtctaatgcctggagacctcaggtgaacaacccgaaagaatggctccaggtggactttcagaagaccatgaaagtaacaggtgtcactactcagggagttaagtccttgctcaccagcatgtatgtgaaggagttccttatttcctcatcacaagatggccaccagtggaccctcttctttcagaatggtaaggtcaaagtgtttcagggcaatcaagacagcttcacacccgtggtgaacagtcttgatcctccactcttgacacgataccttcgaatccatccacagtcttgggttcaccagattgcattgcgcatggaagtacttggatgcgaggctcaggacctctac

SEQ ID NO: 2822 - protein, 1457 aa, synthetic construct
  REGION 1..1457: note = Variant of human B-domain deleted Factor VIII
MQIELSTCFFLCLLRFCFSATRRYYLGAVELSWDYMQSDLGELPVDARFPPRVPKSFPFNTSVVYKKTLFVEFTDHLFNIAKPRPPWMGLLGPTIQAEVYDTVVITLKNMASHPVSLHAVGVSYWKASEGAEYDDQTSQREKEDDKVFPGGSHTYVWQVLKENGPMASDPLCLTYSYLSHVDLVKDLNSGLIGALLVCREGSLAKEKTQTLHKFILLFAVFDEGKSWHSETKNSLMQDRDAASARAWPKMHTVNGYVNRSLPGLIGCHRKSVYWHVIGMGTTPEVHSIFLEGHTFLVRNHRQASLEISPITFLTAQTLLMDLGQFLLFCHITSHQHDGMEAYVKVDSCPEEPQLRMKNNEEAEDYDDDLTDSEMDVVRFDDDNSPSFIQIRSVAKKHPKTWVHYIAAEEEDWDYAPLVLAPDDRSYKSQYLNNGPQRIGRKYKKVRFMAYTDETFKTREAIQHESGILGPLLYGEVGDTLLIIFKNQASRPYNIYPHGITDVRPLYSRRLPKGVKHLKDFPILPGEIFKYKWTVTVEDGPTKSDPRCLTRYYSSFVNMERDLASGLIGPLLICYKESVDQRGNQIMSDKRNVILFSVFDENRSWYLTENIQRFLPNPAGVQLEDPEFQASNIMHSINGYVFDSLQLSVCLHEVAYWYILSIGAQTDFLSVFFSGYTFKHKMVYEDTLTLFPFSGETVFMSMENPGLWILGCHNSDFRNRGMTALLKVSSCDKNTGDYYEDSYEDISAYLLSKNNAIEPRSFSQNPPVLKRHQREITRTTLQSDQEEIDYDDTISVEMKKEDFDIYDEDENQSPRSFQKKTRHYFIAAVERLWDYGMSSSPHVLRNRAQSGSVPQFKKVVFQEFTDGSFTQPLYRGELNEHLGLLGPYIRAEVEDNIMVTFRNQASRPYSFYSSLISYEEDQRQGAEPRKNFVKPNETKTYFWKVQHHMAPTKDEFDCKAWAYFSDVDLEKDVHSGLIGPLLVCHTNTLNPAHGRQVTVQEFALFFTIFDETKSWYFTENMERNCRAPCNIQMEDPTFKENYRFHAINGYIMDTLPGLVMAQDQRIRWYLLSMGSNENIHSIHFSGHVFTVRKKEEYKMALYNLYPGVFETVEMLPSKAGIWRVECLIGEHLHAGMSTLFLVYSNKCQTPLGMASGHIRDFQITASGQYGQWAPKLARLHYSGSINAWSTKEPFSWIKVDLLAPMIIHGIKTQGARQKFSSLYISQFIIMYSLDGKKWQTYRGNSTGTLMVFFGNVDSSGIKHNIFNPPIIARYIRLHPTHYSIRSTLRMELMGCDLNSCSMPLGMESKAISDAQITASSYFTNMFATWSPSKARLHLQGRSNAWRPQVNNPKEWLQVDFQKTMKVTGVTTQGVKSLLTSMYVKEFLISSSQDGHQWTLFFQNGKVKVFQGNQDSFTPVVNSLDPPLLTRYLRIHPQSWVHQIALRMEVLGCEAQDLY

SEQ ID NO: 2823 - DNA, 4371 bp, synthetic construct
  misc_feature 1..4371: note = Variant of human B-domain deleted Factor VIII
  source 1..4371: mol_type = other DNA
atgcagattgaactgtctacctgcttcttcctctgtttgctgaggttctgctttagcgccactagacggtactaccttggcgctgtggagctgtcctgggactatatgcagagtgatttgggagagcttcccgtcgacgcacgatttcctcctcgcgttccaaagtcatttcccttcaacacaagcgtggtgtacaagaagacgctcttcgtcgaattcaccgatcacctgttcaatatcgccaaacccagaccaccatggatgggtcttttggggcctaccatacaagcggaggtgtatgacacagttgttatcactctcaagaacatggcttctcatccggtaagtcttcacgcagtgggcgtgtcctactggaaagcttcagaaggagccgagtatgatgatcagacatcccagagggagaaagaagacgacaaggtatttccaggtgggtctcatacctatgtgtggcaagtgctcaaagagaatggccctatggcaagcgatccgctctgtttgacttacagctacctttcacacgttgacctcgtcaaggacctcaactccgggttgattggagccttgttggtatgcagggaaggatctcttgccaaagagaagacacagaccctccacaagtttatccttctctttgctgtgttcgatgagggcaaaagttggcatagcgaaacgaagaattccctcatgcaggatcgcgacgcagccagcgccagagcttggcccaagatgcacactgtgaacggatatgtcaataggtcacttcctggcttgattgggtgtcatcggaaaagtgtctactggcacgtgatcggaatggggacaacaccagaggtccactccatatttctcgaaggccataccttccttgttcgaaaccacagacaggcatccttggagatctctcccattacctttctcactgcccaaacgctccttatggacttgggtcagttccttctcttctgccatatcagctcacaccagcatgatggtatggaagcttatgtgaaagtcgacagttgtcctgaggagccacagttgcgcatgaagaataatgaagaagccgaggattacgacgacgatctcaccgattctgagatggacgtggtgaggtttgatgacgacaactctccctccttcattcaaatccggagcgtggcgaagaaacaccccaagacttgggtccactatatagcggcggaagaggaggattgggattacgctcctcttgtattggcaccagatgaccgctcatacaaaagccagtacctcaacaacggaccgcagagaattggccggaagtataagaaagtgcgatttatggcctatacagacgaaacctttaagacaagggaggccatccagcatgagagtgggattttgggacctcttctttacggcgaagttggtgataccctcctcatcatcttcaagaatcaagcttctcgcccctataacatttacccacacgggatcactgacgttaggcctttgtatagcagaagacttcccaaaggcgtgaagcatctcaaagacttccccattttgccaggcgagatctttaagtacaaatggaccgtcacagtggaagatggaccgactaaatcagaccctcgatgccttacgcggtactattcctccttcgtgaatatggagagagatttggcaagcggactcataggaccactcctcatctgttacaaggaatctgtagaccagaggggtaaccagattatgagtgataaacgcaatgtgatcctttttagcgtcttcgacgagaaccggtcctggtacttgaccgagaatatacaaaggttccttcccaaccccgcaggcgttcagttggaagaccctgagtttcaggccagcaatattatgcactcaatcaacggctatgtgtttgatagtctccagctttctgtttgcctccatgaagtagcctattggtacatcttgtcaattggtgctcaaacagacttcctctccgtcttcttctccggctacacctttaagcacaagatggtgtatgaggacactctcacactctttccattttctggagaaaccgtgttcatgagcatggagaatccaggcctttggatcttgggttgccacaacagtgattttcgcaatcggggaatgactgctctcctcaaagtcagcagctgtgataagaacacaggcgactattacgaagattcttacgaggacataagtgcctacttgttgtccaagaataacgccattgagcccagatcattctcccagaatcctcccgtgcttaaaaggcatcagcgcgaaatcaccagaactactcttcagtctgatcaagaggagattgactatgacgacaccataagcgtggaaatgaagaaggaggatttcgatatctatgacgaagatgagaaccagtctccgcggagctttcagaagaagacgcgacactacttcattgcagcagtcgaaaggctttgggactacggtatgtcatcatcccctcatgtgttgcgcaatagagctcagagtggaagtgttccacagttcaagaaagtcgtctttcaagagtttacagatggcagcttcacacagcctctctatcggggcgagcttaacgaacatttgggactccttggtccctatatccgagccgaagtggaggacaacattatggttacctttaggaatcaagcctctcgcccctacagcttctactcctccctcatcagttatgaggaggatcagagacaaggcgctgaaccacggaagaactttgtgaaaccgaatgagacgaagacctacttctggaaagtacagcaccacatggcccccacaaaagacgaattcgattgcaaagcatgggcgtatttttcagacgttgacttggagaaagatgtacattcaggacttattggtcctttgttggtgtgtcacactaacactctcaatccagcccatggcaggcaggtgacagtccaggaattcgctcttttctttaccatctttgatgagaccaagtcctggtacttcacggaaaacatggagcgcaattgcagagccccctgtaacatacagatggaggaccctacctttaaggaaaattatcggttccacgcaatcaacggatacattatggatacactccctggccttgtgatggctcaggaccaacgaatcaggtggtacctcctcagcatgggttctaatgagaacatacactccattcacttttcaggacatgtgttcactgtccggaagaaagaagagtataagatggccctctacaatttgtatccaggcgtgtttgagaccgttgaaatgcttccctctaaagctggcatctggagagtagagtgcttgatcggagaacatcttcacgcaggtatgagcaccttgttcctcgtgtacagcaacaaatgtcagaccccacttggcatggccagtggacacattcgcgactttcagatcacagcatctggccagtatggacaatgggccccaaagttggctcgcctccattactccggtagcataaatgcgtggtccactaaagaacctttcagctggattaaggtcgatcttcttgcccccatgatcatccacggcattaagacacagggagcgaggcagaaattctcctccctctacatctcacagttcattattatgtatagtttggacggcaagaagtggcaaacttatagaggtaacagtactggaacacagatggtgttcttcggcaacgttgatagctctggcatcaaacacaacatctttaatcctcccataatagctcggtacatcagattgcatccgacccactacagcattaggagtacactccgaatggagcttatgggttgcgacttgaattcctgttcaatgccactcggaatggagtctaaagccatctctgatgcacagataaccgccagtagctactttacgaacatgtttgctacgtggtcaccctctaaggcaaggcttcatttgcaaggccggtctaatgcctggagacctcaggtgaacaacccgaaagaatggctccaggtggactttcagaagaccatgaaagtaacaggtgtcactactcagggagttaagtccttgctcaccagcatgtatgtgaaggagttccttatttcctcatcacaagatggccaccagtggaccctcttctttcagaatggtaaggtcaaagtgtttcagggcaatcaagacagcttcacacccgtggtgaacagtcttgatcctccactcttgacacgataccttcgaatccatccacagtcttgggttcaccagattgcattgcgcatggaagtacttggatgcgaggctcaggacctctac

SEQ ID NO: 2824 - protein, 1457 aa, synthetic construct
  REGION 1..1457: note = Variant of human B-domain deleted Factor VIII
MQIELSTCFFLCLLRFCFSATRRYYLGAVELSWDYMQSDLGELPVDARFPPRVPKSFPFNTSVVYKKTLFVEFTDHLFNIAKPRPPWMGLLGPTIQAEVYDTVVITLKNMASHPVSLHAVGVSYWKASEGAEYDDQTSQREKEDDKVFPGGSHTYVWQVLKENGPMASDPLCLTYSYLSHVDLVKDLNSGLIGALLVCREGSLAKEKTQTLHKFILLFAVFDEGKSWHSETKNSLMQDRDAASARAWPKMHTVNGYVNRSLPGLIGCHRKSVYWHVIGMGTTPEVHSIFLEGHTFLVRNHRQASLEISPITFLTAQTLLMDLGQFLLFCHISSHQHDGMEAYVKVDSCPEEPQLRMKNNEEAEDYDDDLTDSEMDVVRFDDDNSPSFIQIRSVAKKHPKTWVHYIAAEEEDWDYAPLVLAPDDRSYKSQYLNNGPQRIGRKYKKVRFMAYTDETFKTREAIQHESGILGPLLYGEVGDTLLIIFKNQASRPYNIYPHGITDVRPLYSRRLPKGVKHLKDFPILPGEIFKYKWTVTVEDGPTKSDPRCLTRYYSSFVNMERDLASGLIGPLLICYKESVDQRGNQIMSDKRNVILFSVFDENRSWYLTENIQRFLPNPAGVQLEDPEFQASNIMHSINGYVFDSLQLSVCLHEVAYWYILSIGAQTDFLSVFFSGYTFKHKMVYEDTLTLFPFSGETVFMSMENPGLWILGCHNSDFRNRGMTALLKVSSCDKNTGDYYEDSYEDISAYLLSKNNAIEPRSFSQNPPVLKRHQREITRTTLQSDQEEIDYDDTISVEMKKEDFDIYDEDENQSPRSFQKKTRHYFIAAVERLWDYGMSSSPHVLRNRAQSGSVPQFKKVVFQEFTDGSFTQPLYRGELNEHLGLLGPYIRAEVEDNIMVTFRNQASRPYSFYSSLISYEEDQRQGAEPRKNFVKPNETKTYFWKVQHHMAPTKDEFDCKAWAYFSDVDLEKDVHSGLIGPLLVCHTNTLNPAHGRQVTVQEFALFFTIFDETKSWYFTENMERNCRAPCNIQMEDPTFKENYRFHAINGYIMDTLPGLVMAQDQRIRWYLLSMGSNENIHSIHFSGHVFTVRKKEEYKMALYNLYPGVFETVEMLPSKAGIWRVECLIGEHLHAGMSTLFLVYSNKCQTPLGMASGHIRDFQITASGQYGQWAPKLARLHYSGSINAWSTKEPFSWIKVDLLAPMIIHGIKTQGARQKFSSLYISQFIIMYSLDGKKWQTYRGNSTGTQMVFFGNVDSSGIKHNIFNPPIIARYIRLHPTHYSIRSTLRMELMGCDLNSCSMPLGMESKAISDAQITASSYFTNMFATWSPSKARLHLQGRSNAWRPQVNNPKEWLQVDFQKTMKVTGVTTQGVKSLLTSMYVKEFLISSSQDGHQWTLFFQNGKVKVFQGNQDSFTPVVNSLDPPLLTRYLRIHPQSWVHQIALRMEVLGCEAQDLY

SEQ ID NO: 2825 - DNA, 4371 bp, synthetic construct
  misc_feature 1..4371: note = Variant of human B-domain deleted Factor VIII
  source 1..4371: mol_type = other DNA
atgcagattgaactgtctacctgcttcttcctctgtttgctgaggttctgctttagcgccactagacggtactaccttggcgctgtggagctgtcctgggactatatgcagagtgatttgggagagcttcccgtcgacgcacgatttcctcctcgcgttccaaagtcatttcccttcaacacaagcgtggtgtacaagaagacgctcttcgtcgaattcaccgatcacctgttcaatatcgccaaacccagaccaccatggatgggtcttttggggcctaccatacaagcggaggtgtatgacacagttgttatcactctcaagaacatggcttctcatccggtaagtcttcacgcagtgggcgtgtcctactggaaagcttcagaaggagccgagtatgatgatcagacatcccagagggagaaagaagacgacaaggtatttccaggtgggtctcatacctatgtgtggcaagtgctcaaagagaatggccctatggcaagcgatccgctctgtttgacttacagctacctttcacacgttgacctcgtcaaggacctcaactccgggttgattggagccttgttggtatgcagggaaggatctcttgccaaagagaagacacagaccctccacaagtttatccttctctttgctgtgttcgatgagggcaaaagttggcatagcgaaacgaagaattccctcatgcaggatcgcgacgcagccagcgccagagcttggcccaagatgcacactgtgaacggatatgtcaataggtcacttcctggcttgattgggtgtcatcggaaaagtgtctactggcacgtgatcggaatggggacaacaccagaggtccactccatatttctcgaaggccataccttccttgttcgaaaccacagacaggcatccttggagatctctcccattacctttctcactgcccaaacgctccttatggacttgggtcagttccttctcttctgccatatcagctcacaccagcatgatggtatggaagcttatgtgaaagtcgacagttgtcctgaggagccacagttgcgcatgaagaataatgaagaagccgaggattacgacgacgatctcaccgattctgagatggacgtggtgaggtttgatgacgacaactctccctccttcattcaaatccggagcgtggcgaagaaacaccccaagacttgggtccactatatagcggcggaagaggaggattgggattacgctcctcttgtattggcaccagatgaccgctcatacaaaagccagtacctcaacaacggaccgcagagaattggccggaagtataagaaagtgcgatttatggcctatacagacgaaacctttaagacaagggaggccatccagcatgagagtgggattttgggacctcttctttacggcgaagttggtgataccctcctcatcatcttcaagaatcaagcttctcgcccctataacatttacccacacgggatcactgacgttaggcctttgtatagcagaagacttcccaaaggcgtgaagcatctcaaagacttccccattttgccaggcgagatctttaagtacaaatggaccgtcacagtggaagatggaccgactaaatcagaccctcgatgccttacgcggtactattcctccttcgtgaatatggagagagatttggcaagcggactcataggaccactcctcatctgttacaaggaatctgtagaccagaggggtaaccagattatgagtgataaacgcaatgtgatcctttttagcgtcttcgacgagaaccggtcctggtacttgaccgagaatatacaaaggttccttcccaaccccgcaggcgttcagttggaagaccctgagtttcaggccagcaatattatgcactcaatcaacggctatgtgtttgatagtctccagctttctgtttgcctccatgaagtagcctattggtacatcttgtcaattggtgctcaaacagacttcctctccgtcttcttctccggctacacctttaagcacaagatggtgtatgaggacactctcacactctttccattttctggagaaaccgtgttcatgagcatggagaatccaggcctttggatcttgggttgccacaacagtgattttcgcaatcggggaatgactgctctcctcaaagtcagcagctgtgataagaacacaggcgactattacgaagattcttacgaggacataagtgcctacttgttgtccaagaataacgccattgagcccagatcattctcccagaatcctcccgtgcttaaaaggcatcagcgcgaaatcaccagaactactcttcagtctgatcaagaggagattgactatgacgacaccataagcgtggaaatgaagaaggaggatttcgatatctatgacgaagatgagaaccagtctccgcggagctttcagaagaagacgcgacactacttcattgcagcagtcgaaaggctttgggactacggtatgtcatcatcccctcatgtgttgcgcaatagagctcagagtggaagtgttccacagttcaagaaagtcgtctttcaagagtttacagatggcagcttcacacagcctctctatcggggcgagcttaacgaacatttgggactccttggtccctatatccgagccgaagtggaggacaacattatggttacctttaggaatcaagcctctcgcccctacagcttctactcctccctcatcagttatgaggaggatcagagacaaggcgctgaaccacggaagaactttgtgaaaccgaatgagacgaagacctacttctggaaagtacagcaccacatggcccccacaaaagacgaattcgattgcaaagcatgggcgtatttttcagacgttgacttggagaaagatgtacattcaggacttattggtcctttgttggtgtgtcacactaacactctcaatccagcccatggcaggcaggtgacagtccaggaattcgctcttttctttaccatctttgatgagaccaagtcctggtacttcacggaaaacatggagcgcaattgcagagccccctgtaacatacagatggaggaccctacctttaaggaaaattatcggttccacgcaatcaacggatacattatggatacactccctggccttgtgatggctcaggaccaacgaatcaggtggtacctcctcagcatgggttctaatgagaacatacactccattcacttttcaggacatgtgttcactgtccggaagaaagaagagtataagatggccctctacaatttgtatccaggcgtgtttgagaccgttgaaatgcttccctctaaagctggcatctggagagtagagtgcttgatcggagaacatcttcacgcaggtatgagcaccttgttcctcgtgtacagcaacaaatgtcagaccccacttggcatggccagtggacacattcgcgactttcagatcacagcatctggccagtatggacaatgggccccaaagttggctcgcctccattactccggtagcataaatgcgtggtccactaaagaacctttcagctggattaaggtcgatcttcttgcccccatgatcatccacggcattaagacacagggagcgaggcagaaattctcctccctctacatctcacagttcattattatgtatagtttggacggcaagaagtggcaaacttatagaggtaacagtactggaacactcatggtgttcttcggcaacgttgatagctctggcatcaaacacaacatctttaatcctcccataatagctcggtacatcagattgcatccgacccactacagcattaggagtacactccgaatggagcttatgggttgcgacttgaattcctgttcaatgccactcggaatggagtctaaagccatctctgatgcacagataaccgccagtagctactttacgaacatgtttgctacgtggtcaccctctaaggcaaggcttcatttgcaaggccggtctaatgcctggagacctcaggtgaacaacccgaaagaatggctccaggtggactttcagaagaccatgaaagtaacaggtgtcactactcagggagttaagtccttgtgtaccagcatgtatgtgaaggagttccttatttcctcatcacaagatggccaccagtggaccctcttctttcagaatggtaaggtcaaagtgtttcagggcaatcaagacagcttcacacccgtggtgaacagtcttgatcctccactcttgacacgataccttcgaatccatccacagtcttgggttcaccagattgcattgcgcatggaagtacttggatgcgaggctcaggacctctac

SEQ ID NO: 2826 - protein, 1457 aa, synthetic construct
  REGION 1..1457: note = Variant of human B-domain deleted Factor VIII
MQIELSTCFFLCLLRFCFSATRRYYLGAVELSWDYMQSDLGELPVDARFPPRVPKSFPFNTSVVYKKTLFVEFTDHLFNIAKPRPPWMGLLGPTIQAEVYDTVVITLKNMASHPVSLHAVGVSYWKASEGAEYDDQTSQREKEDDKVFPGGSHTYVWQVLKENGPMASDPLCLTYSYLSHVDLVKDLNSGLIGALLVCREGSLAKEKTQTLHKFILLFAVFDEGKSWHSETKNSLMQDRDAASARAWPKMHTVNGYVNRSLPGLIGCHRKSVYWHVIGMGTTPEVHSIFLEGHTFLVRNHRQASLEISPITFLTAQTLLMDLGQFLLFCHISSHQHDGMEAYVKVDSCPEEPQLRMKNNEEAEDYDDDLTDSEMDVVRFDDDNSPSFIQIRSVAKKHPKTWVHYIAAEEEDWDYAPLVLAPDDRSYKSQYLNNGPQRIGRKYKKVRFMAYTDETFKTREAIQHESGILGPLLYGEVGDTLLIIFKNQASRPYNIYPHGITDVRPLYSRRLPKGVKHLKDFPILPGEIFKYKWTVTVEDGPTKSDPRCLTRYYSSFVNMERDLASGLIGPLLICYKESVDQRGNQIMSDKRNVILFSVFDENRSWYLTENIQRFLPNPAGVQLEDPEFQASNIMHSINGYVFDSLQLSVCLHEVAYWYILSIGAQTDFLSVFFSGYTFKHKMVYEDTLTLFPFSGETVFMSMENPGLWILGCHNSDFRNRGMTALLKVSSCDKNTGDYYEDSYEDISAYLLSKNNAIEPRSFSQNPPVLKRHQREITRTTLQSDQEEIDYDDTISVEMKKEDFDIYDEDENQSPRSFQKKTRHYFIAAVERLWDYGMSSSPHVLRNRAQSGSVPQFKKVVFQEFTDGSFTQPLYRGELNEHLGLLGPYIRAEVEDNIMVTFRNQASRPYSFYSSLISYEEDQRQGAEPRKNFVKPNETKTYFWKVQHHMAPTKDEFDCKAWAYFSDVDLEKDVHSGLIGPLLVCHTNTLNPAHGRQVTVQEFALFFTIFDETKSWYFTENMERNCRAPCNIQMEDPTFKENYRFHAINGYIMDTLPGLVMAQDQRIRWYLLSMGSNENIHSIHFSGHVFTVRKKEEYKMALYNLYPGVFETVEMLPSKAGIWRVECLIGEHLHAGMSTLFLVYSNKCQTPLGMASGHIRDFQITASGQYGQWAPKLARLHYSGSINAWSTKEPFSWIKVDLLAPMIIHGIKTQGARQKFSSLYISQFIIMYSLDGKKWQTYRGNSTGTLMVFFGNVDSSGIKHNIFNPPIIARYIRLHPTHYSIRSTLRMELMGCDLNSCSMPLGMESKAISDAQITASSYFTNMFATWSPSKARLHLQGRSNAWRPQVNNPKEWLQVDFQKTMKVTGVTTQGVKSLCTSMYVKEFLISSSQDGHQWTLFFQNGKVKVFQGNQDSFTPVVNSLDPPLLTRYLRIHPQSWVHQIALRMEVLGCEAQDLY

SEQ ID NO: 2827 - DNA, 4371 bp, synthetic construct
  misc_feature 1..4371: note = Variant of human B-domain deleted Factor VIII
  source 1..4371: mol_type = other DNA
atgcagattgaactgtctacctgcttcttcctctgtttgctgaggttctgctttagcgccactagacggtactaccttggcgctgtggagctgtcctgggactatatgcagagtgatttgggagagcttcccgtcgacgcacgatttcctcctcgcgttccaaagtcatttcccttcaacacaagcgtggtgtacaagaagacgctcttcgtcgaattcaccgatcacctgttcaatatcgccaaacccagaccaccatggatgggtcttttggggcctaccatacaagcggaggtgtatgacacagttgttatcactctcaagaacatggcttctcatccggtaagtcttcacgcagtgggcgtgtcctactggaaagcttcagaaggagccgagtatgatgatcagacatcccagagggagaaagaagacgacaaggtatttccaggtgggtctcatacctatgtgtggcaagtgctcaaagagaatggccctatggcaagcgatccgctctgtttgacttacagctacctttcacacgttgacctcgtcaaggacctcaactccgggttgattggagccttgttggtatgcagggaaggatctcttgccaaagagaagacacagaccctccacaagtttatccttctctttgctgtgttcgatgagggcaaaagttggcatagcgaaacgaagaattccctcatgcaggatcgcgacgcagccagcgccagagcttggcccaagatgcacactgtgaacggatatgtcaataggtcacttcctggcttgattgggtgtcatcggaaaagtgtctactggcacgtgatcggaatggggacaacaccagaggtccactccatatttctcgaaggccataccttccttgttcgaaaccacagacaggcatccttggagatctctcccattacctttctcactgcccaaacgctccttatggacttgggtcagttccttctcttctgccatatcagctcacaccagcatgatggtatggaagcttatgtgaaagtcgacagttgtcctgaggagccacagttgcgcatgaagaataatgaagaagccgaggattacgacgacgatctcaccgattctgagatggacgtggtgaggtttgatgacgacaactctccctccttcattcaaatccggagcgtggcgaagaaacaccccaagacttgggtccactatatagcggcggaagaggaggattgggattacgctcctcttgtattggcaccagatgaccgctcatacaaaagccagtacctcaacaacggaccgcagagaattggccggaagtataagaaagtgcgatttatggcctatacagacgaaacctttaagacaagggaggccatccagcatgagagtgggattttgggacctcttctttacggcgaagttggtgataccctcctcatcatcttcaagaatcaagcttctcgcccctataacatttacccacacgggatcactgacgttaggcctttgtatagcagaagacttcccaaaggcgtgaagcatctcaaagacttccccattttgccaggcgagatctttaagtacaaatggaccgtcacagtggaagatggaccgactaaatcagaccctcgatgccttacgcggtactattcctccttcgtgaatatggagagagatttggcaagcggactcataggaccactcctcatctgttacaaggaatctgtagaccagaggggtaaccagattatgagtgataaacgcaatgtgatcctttttagcgtcttcgacgagaaccggtcctggtacttgaccgagaatatacaaaggttccttcccaaccccgcaggcgttcagttggaagaccctgagtttcaggccagcaatattatgcactcaatcaacggctatgtgtttgatagtctccagctttctgtttgcctccatgaagtagcctattggtacatcttgtcaattggtgctcaaacagacttcctctccgtcttcttctccggctacacctttaagcacaagatggtgtatgaggacactctcacactctttccattttctggagaaaccgtgttcatgagcatggagaatccaggcctttggatcttgggttgccacaacagtgattttcgcaatcggggaatgactgctctcctcaaagtcagcagctgtgataagaacacaggcgactattacgaagattcttacgaggacataagtgcctacttgttgtccaagaataacgccattgagcccagatcattctcccagaatcctcccgtgcttaaaaggcatcagcgcgaaatcaccagaactactcttcagtctgatcaagaggagattgactatgacgacaccataagcgtggaaatgaagaaggaggatttcgatatctatgacgaagatgagaaccagtctccgcggagctttcagaagaagacgcgacactacttcattgcagcagtcgaaaggctttgggactacggtatgtcatcatcccctcatgtgttgcgcaatagagctcagagtggaagtgttccacagttcaagaaagtcgtctttcaagagtttacagatggcagcttcacacagcctctctatcggggcgagcttaacgaacatttgggactccttggtccctatatccgagccgaagtggaggacaacattatggttacctttaggaatcaagcctctcgcccctacagcttctactcctccctcatcagttatgaggaggatcagagacaaggcgctgaaccacggaagaactttgtgaaaccgaatgagacgaagacctacttctggaaagtacagcaccacatggcccccacaaaagacgaattcgattgcaaagcatgggcgtatttttcagacgttgacttggagaaagatgtacattcaggacttattggtcctttgttggtgtgtcacactaacactctcaatccagcccatggcaggcaggtgacagtccaggaattcgctcttttctttaccatctttgatgagaccaagtcctggtacttcacggaaaacatggagcgcaattgcagagccccctgtaacatacagatggaggaccctacctttaaggaaaattatcggttccacgcaatcaacggatacattatggatacactccctggccttgtgatggctcaggaccaacgaatcaggtggtacctcctcagcatgggttctaatgagaacatacactccattcacttttcaggacatgtgttcactgtccggaagaaagaagagtataagatggccctctacaatttgtatccaggcgtgtttgagaccgttgaaatgcttccctctaaagctggcatctggagagtagagtgcttgatcggagaacatcttcacgcaggtatgagcaccttgttcctcgtgtacagcaacaaatgtcagaccccacttggcatggccagtggacacattcgcgactttcagatcacagcatctggccagtatggacaatgggccccaaagttggctcgcctccattactccggtagcataaatgcgtggtccactaaagaacctttcagctggattaaggtcgatcttcttgcccccatgatcatccacggcattaagacacagggagcgaggcagaaattctcctccctctacatctcacagttcattattatgtatagtttggacggcaagaagtggcaaacttatagaggtaacagtactggaacacatatggtgttcttcggcaacgttgatagctctggcatcaaacacaacatctttaatcctcccataatagctcggtacatcagattgcatccgacccactacagcattaggagtacactccgaatggagcttatgggttgcgacttgaattcctgttcaatgccactcggaatggagtctaaagccatctctgatgcacagataaccgccagtagctactttacgaacatgtttgctacgtggtcaccctctaaggcaaggcttcatttgcaaggccggtctaatgcctggagacctcaggtgaacaacccgaaagaatggctccaggtggactttcagaagaccatgaaagtaacaggtgtcactactcagggagttaagtccttgctcaccagcatgtatgtgaaggagttccttatttcctcatcacaagatggccaccagtggaccctcttctttcagaatggtaaggtcaaagtgtttcagggcaatcaagacagcttcacacccgtggtgaacagtcttgatcctccactcttgacacgataccttcgaatccatccacagtcttgggttcaccagattgcattgcgcatggaagtacttggatgcgaggctcaggacctctac

SEQ ID NO: 2828 - protein, 1457 aa, synthetic construct
  REGION 1..1457: note = Variant of human B-domain deleted Factor VIII
MQIELSTCFFLCLLRFCFSATRRYYLGAVELSWDYMQSDLGELPVDARFPPRVPKSFPFNTSVVYKKTLFVEFTDHLFNIAKPRPPWMGLLGPTIQAEVYDTVVITLKNMASHPVSLHAVGVSYWKASEGAEYDDQTSQREKEDDKVFPGGSHTYVWQVLKENGPMASDPLCLTYSYLSHVDLVKDLNSGLIGALLVCREGSLAKEKTQTLHKFILLFAVFDEGKSWHSETKNSLMQDRDAASARAWPKMHTVNGYVNRSLPGLIGCHRKSVYWHVIGMGTTPEVHSIFLEGHTFLVRNHRQASLEISPITFLTAQTLLMDLGQFLLFCHISSHQHDGMEAYVKVDSCPEEPQLRMKNNEEAEDYDDDLTDSEMDVVRFDDDNSPSFIQIRSVAKKHPKTWVHYIAAEEEDWDYAPLVLAPDDRSYKSQYLNNGPQRIGRKYKKVRFMAYTDETFKTREAIQHESGILGPLLYGEVGDTLLIIFKNQASRPYNIYPHGITDVRPLYSRRLPKGVKHLKDFPILPGEIFKYKWTVTVEDGPTKSDPRCLTRYYSSFVNMERDLASGLIGPLLICYKESVDQRGNQIMSDKRNVILFSVFDENRSWYLTENIQRFLPNPAGVQLEDPEFQASNIMHSINGYVFDSLQLSVCLHEVAYWYILSIGAQTDFLSVFFSGYTFKHKMVYEDTLTLFPFSGETVFMSMENPGLWILGCHNSDFRNRGMTALLKVSSCDKNTGDYYEDSYEDISAYLLSKNNAIEPRSFSQNPPVLKRHQREITRTTLQSDQEEIDYDDTISVEMKKEDFDIYDEDENQSPRSFQKKTRHYFIAAVERLWDYGMSSSPHVLRNRAQSGSVPQFKKVVFQEFTDGSFTQPLYRGELNEHLGLLGPYIRAEVEDNIMVTFRNQASRPYSFYSSLISYEEDQRQGAEPRKNFVKPNETKTYFWKVQHHMAPTKDEFDCKAWAYFSDVDLEKDVHSGLIGPLLVCHTNTLNPAHGRQVTVQEFALFFTIFDETKSWYFTENMERNCRAPCNIQMEDPTFKENYRFHAINGYIMDTLPGLVMAQDQRIRWYLLSMGSNENIHSIHFSGHVFTVRKKEEYKMALYNLYPGVFETVEMLPSKAGIWRVECLIGEHLHAGMSTLFLVYSNKCQTPLGMASGHIRDFQITASGQYGQWAPKLARLHYSGSINAWSTKEPFSWIKVDLLAPMIIHGIKTQGARQKFSSLYISQFIIMYSLDGKKWQTYRGNSTGTHMVFFGNVDSSGIKHNIFNPPIIARYIRLHPTHYSIRSTLRMELMGCDLNSCSMPLGMESKAISDAQITASSYFTNMFATWSPSKARLHLQGRSNAWRPQVNNPKEWLQVDFQKTMKVTGVTTQGVKSLLTSMYVKEFLISSSQDGHQWTLFFQNGKVKVFQGNQDSFTPVVNSLDPPLLTRYLRIHPQSWVHQIALRMEVLGCEAQDLY

SEQ ID NO: 2829 - DNA, 4371 bp, synthetic construct
  misc_feature 1..4371: note = Variant of human B-domain deleted Factor VIII
  source 1..4371: mol_type = other DNA
atgcagattgaactgtctacctgcttcttcctctgtttgctgaggttctgctttagcgccactagacggtactaccttggcgctgtggagctgtcctgggactatatgcagagtgatttgggagagcttcccgtcgacgcacgatttcctcctcgcgttccaaagtcatttcccttcaacacaagcgtggtgtacaagaagacgctcttcgtcgaattcaccgatcacctgttcaatatcgccaaacccagaccaccatggatgggtcttttggggcctaccatacaagcggaggtgtatgacacagttgttatcactctcaagaacatggcttctcatccggtaagtcttcacgcagtgggcgtgtcctactggaaagcttcagaaggagccgagtatgatgatcagacatcccagagggagaaagaagacgacaaggtatttccaggtgggtctcatacctatgtgtggcaagtgctcaaagagaatggccctatggcaagcgatccgctctgtttgacttacagctacctttcacacgttgacctcgtcaaggacctcaactccgggttgattggagccttgttggtatgcagggaaggatctcttgccaaagagaagacacagaccctccacaagtttatccttctctttgctgtgttcgatgagggcaaaagttggcatagcgaaacgaagaattccctcatgcaggatcgcgacgcagccagcgccagagcttggcccaagatgcacactgtgaacggatatgtcaataggtcacttcctggcttgattgggtgtcatcggaaaagtgtctactggcacgtgatcggaatggggacaacaccagaggtccactccatatttctcgaaggccataccttccttgttcgaaaccacagacaggcatccttggagatctctcccattacctttctcactgcccaaacgctccttatggacttgggtcagttccttctcttctgccatatcagctcacaccagcatgatggtatggaagcttatgtgaaagtcgacagttgtcctgaggagccacagttgcgcatgaagaataatgaagaagccgaggattacgacgacgatctcaccgattctgagatggacgtggtgaggtttgatgacgacaactctccctccttcattcaaatccggagcgtggcgaagaaacaccccaagacttgggtccactatatagcggcggaagaggaggattgggattacgctcctcttgtattggcaccagatgaccgctcatacaaaagccagtacctcaacaacggaccgcagagaattggccggaagtataagaaagtgcgatttatggcctatacagacgaaacctttaagacaagggaggccatccagcatgagagtgggattttgggacctcttctttacggcgaagttggtgataccctcctcatcatcttcaagaatcaagcttctcgcccctataacatttacccacacgggatcactgacgttaggcctttgtatagcagaagacttcccaaaggcgtgaagcatctcaaagacttccccattttgccaggcgagatctttaagtacaaatggaccgtcacagtggaagatggaccgactaaatcagaccctcgatgccttacgcggtactattcctccttcgtgaatatggagagagatttggcaagcggactcataggaccactcctcatctgttacaaggaatctgtagaccagaggggtaaccagattatgagtgataaacgcaatgtgatcctttttagcgtcttcgacgagaaccggtcctggtacttgaccgagaatatacaaaggttccttcccaaccccgcaggcgttcagttggaagaccctgagtttcaggccagcaatattatgcactcaatcaacggctatgtgtttgatagtctccagctttctgtttgcctccatgaagtagcctattggtacatcttgtcaattggtgctcaaacagacttcctctccgtcttcttctccggctacacctttaagcacaagagtgtgtatgaggacactctcacactctttccattttctggagaaaccgtgttcatgagcatggagaatccaggcctttggatcttgggttgccacaacagtgattttcgcaatcggggaatgactgctctcctcaaagtcagcagctgtgataagaacacaggcgactattacgaagattcttacgaggacataagtgcctacttgttgtccaagaataacgccattgagcccagatcattctcccagaatcctcccgtgcttaaaaggcatcagcgcgaaatcaccagaactactcttcagtctgatcaagaggagattgactatgacgacaccataagcgtggaaatgaagaaggaggatttcgatatctatgacgaagatgagaaccagtctccgcggagctttcagaagaagacgcgacactacttcattgcagcagtcgaaaggctttgggactacggtatgtcatcatcccctcatgtgttgcgcaatagagctcagagtggaagtgttccacagttcaagaaagtcgtctttcaagagtttacagatggcagcttcacacagcctctctatcggggcgagcttaacgaacatttgggactccttggtccctatatccgagccgaagtggaggacaacattatggttacctttaggaatcaagcctctcgcccctacagcttctactcctccctcatcagttatgaggaggatcagagacaaggcgctgaaccacggaagaactttgtgaaaccgaatgagacgaagacctacttctggaaagtacagcaccacatggcccccacaaaagacgaattcgattgcaaagcatgggcgtatttttcagacgttgacttggagaaagatgtacattcaggacttattggtcctttgttggtgtgtcacactaacactctcaatccagcccatggcaggcaggtgacagtccaggaattcgctcttttctttaccatctttgatgagaccaagtcctggtacttcacggaaaacatggagcgcaattgcagagccccctgtaacatacagatggaggaccctacctttaaggaaaattatcggttccacgcaatcaacggatacattatggatacactccctggccttgtgatggctcaggaccaacgaatcaggtggtacctcctcagcatgggttctaatgagaacatacactccattcacttttcaggacatgtgttcactgtccggaagaaagaagagtataagatggccctctacaatttgtatccaggcgtgtttgagaccgttgaaatgcttccctctaaagctggcatctggagagtagagtgcttgatcggagaacatcttcacgcaggtatgagcaccttgttcctcgtgtacagcaacaaatgtcagaccccacttggcatggccagtggacacattcgcgactttcagatcacagcatctggccagtatggacaatgggccccaaagttggctcgcctccattactccggtagcataaatgcgtggtccactaaagaacctttcagctggattaaggtcgatcttcttgcccccatgatcatccacggcattaagacacagggagcgaggcagaaattctcctccctctacatctcacagttcattattatgtatagtttggacggcaagaagtggcaaacttatagaggtaacagtactggaacactcatggtgttcttcggcaacgttgatagctctggcatcaaacacaacatctttaatcctcccataatagctcggtacatcagattgcatccgacccactacagcattaggagtacactccgaatggagcttatgggttgcgacttgaattcctgttcaatgccactcggaatggagtctaaagccatctctgatgcacagataaccgccagtagctactttacgaacatgtttgctacgtggtcaccctctaaggcaaggcttcatttgcaaggccggtctaatgcctggagacctcaggtgaacaacccgaaagaatggctccaggtggactttcagaagaccatgaaagtaacaggtgtcactactcagggagttaagtccttgctcaccagcatgtatgtgaaggagttccttatttcctcatcacaagatggccaccagtggaccctcttctttcagaatggtaaggtcaaagtgtttcagggcaatcaagacagcttcacacccgtggtgaacagtcttgatcctccactcttgacacgataccttcgaatccatccacagtcttgggttcaccagattgcattgcgcatggaagtacttggatgcgaggctcaggacctctac

SEQ ID NO: 2830 - protein, 1457 aa, synthetic construct
  REGION 1..1457: note = Variant of human B-domain deleted Factor VIII
MQIELSTCFFLCLLRFCFSATRRYYLGAVELSWDYMQSDLGELPVDARFPPRVPKSFPFNTSVVYKKTLFVEFTDHLFNIAKPRPPWMGLLGPTIQAEVYDTVVITLKNMASHPVSLHAVGVSYWKASEGAEYDDQTSQREKEDDKVFPGGSHTYVWQVLKENGPMASDPLCLTYSYLSHVDLVKDLNSGLIGALLVCREGSLAKEKTQTLHKFILLFAVFDEGKSWHSETKNSLMQDRDAASARAWPKMHTVNGYVNRSLPGLIGCHRKSVYWHVIGMGTTPEVHSIFLEGHTFLVRNHRQASLEISPITFLTAQTLLMDLGQFLLFCHISSHQHDGMEAYVKVDSCPEEPQLRMKNNEEAEDYDDDLTDSEMDVVRFDDDNSPSFIQIRSVAKKHPKTWVHYIAAEEEDWDYAPLVLAPDDRSYKSQYLNNGPQRIGRKYKKVRFMAYTDETFKTREAIQHESGILGPLLYGEVGDTLLIIFKNQASRPYNIYPHGITDVRPLYSRRLPKGVKHLKDFPILPGEIFKYKWTVTVEDGPTKSDPRCLTRYYSSFVNMERDLASGLIGPLLICYKESVDQRGNQIMSDKRNVILFSVFDENRSWYLTENIQRFLPNPAGVQLEDPEFQASNIMHSINGYVFDSLQLSVCLHEVAYWYILSIGAQTDFLSVFFSGYTFKHKSVYEDTLTLFPFSGETVFMSMENPGLWILGCHNSDFRNRGMTALLKVSSCDKNTGDYYEDSYEDISAYLLSKNNAIEPRSFSQNPPVLKRHQREITRTTLQSDQEEIDYDDTISVEMKKEDFDIYDEDENQSPRSFQKKTRHYFIAAVERLWDYGMSSSPHVLRNRAQSGSVPQFKKVVFQEFTDGSFTQPLYRGELNEHLGLLGPYIRAEVEDNIMVTFRNQASRPYSFYSSLISYEEDQRQGAEPRKNFVKPNETKTYFWKVQHHMAPTKDEFDCKAWAYFSDVDLEKDVHSGLIGPLLVCHTNTLNPAHGRQVTVQEFALFFTIFDETKSWYFTENMERNCRAPCNIQMEDPTFKENYRFHAINGYIMDTLPGLVMAQDQRIRWYLLSMGSNENIHSIHFSGHVFTVRKKEEYKMALYNLYPGVFETVEMLPSKAGIWRVECLIGEHLHAGMSTLFLVYSNKCQTPLGMASGHIRDFQITASGQYGQWAPKLARLHYSGSINAWSTKEPFSWIKVDLLAPMIIHGIKTQGARQKFSSLYISQFIIMYSLDGKKWQTYRGNSTGTLMVFFGNVDSSGIKHNIFNPPIIARYIRLHPTHYSIRSTLRMELMGCDLNSCSMPLGMESKAISDAQITASSYFTNMFATWSPSKARLHLQGRSNAWRPQVNNPKEWLQVDFQKTMKVTGVTTQGVKSLLTSMYVKEFLISSSQDGHQWTLFFQNGKVKVFQGNQDSFTPVVNSLDPPLLTRYLRIHPQSWVHQIALRMEVLGCEAQDLY

SEQ ID NO: 2831 - DNA, 4371 bp, synthetic construct
  misc_feature 1..4371: note = Variant of human B-domain deleted Factor VIII
  source 1..4371: mol_type = other DNA
atgcagattgaactgtctacctgcttcttcctctgtttgctgaggttctgctttagcgccactagacggtactaccttggcgctgtggagctgtcctgggactatatgcagagtgatttgggagagcttcccgtcgacgcacgatttcctcctcgcgttccaaagtcatttcccttcaacacaagcgtggtgtacaagaagacgctcttcgtcgaattcaccgatcacctgttcaatatcgccaaacccagaccaccatggatgggtcttttggggcctaccatacaagcggaggtgtatgacacagttgttatcactctcaagaacatggcttctcatccggtaagtcttcacgcagtgggcgtgtcctactggaaagcttcagaaggagccgagtatgatgatcagacatcccagagggagaaagaagacgacaaggtatttccaggtgggtctcatacctatgtgtggcaagtgctcaaagagaatggccctatggcaagcgatccgctctgtttgacttacagctacctttcacacgttgacctcgtcaaggacctcaactccgggttgattggagccttgttggtatgcagggaaggatctcttgccaaagagaagacacagaccctccacaagtttatccttctctttgctgtgttcgatgagggcaaaagttggcatagcgaaacgaagaattccctcatgcaggatcgcgacgcagccagcgccagagcttggcccaagatgcacactgtgaacggatatgtcaataggtcacttcctggcttgattgggtgtcatcggaaaagtgtctactggcacgtgatcggaatggggacaacaccagaggtccactccatatttctcgaaggccataccttccttgttcgaaaccacagacaggcatccttggagatctctcccattacctttctcactgcccaaacgctccttatggacttgggtcagttccttctcttctgccatatcagctcacaccagcatgatggtatggaagcttatgtgaaagtcgacagttgtcctgaggagccacagttgcgcatgaagaataatgaagaagccgaggattacgacgacgatctcaccgattctgagatggacgtggtgaggtttgatgacgacaactctccctccttcattcaaggtcggagcgtggcgaagaaacaccccaagacttgggtccactatatagcggcggaagaggaggattgggattacgctcctcttgtattggcaccagatgaccgctcatacaaaagccagtacctcaacaacggaccgcagagaattggccggaagtataagaaagtgcgatttatggcctatacagacgaaacctttaagacaagggaggccatccagcatgagagtgggattttgggacctcttctttacggcgaagttggtgataccctcctcatcatcttcaagaatcaagcttctcgcccctataacatttacccacacgggatcactgacgttaggcctttgtatagcagaagacttcccaaaggcgtgaagcatctcaaagacttccccattttgccaggcgagatctttaagtacaaatggaccgtcacagtggaagatggaccgactaaatcagaccctcgatgccttacgcggtactattcctccttcgtgaatatggagagagatttggcaagcggactcataggaccactcctcatctgttacaaggaatctgtagaccagaggggtaaccagattatgagtgataaacgcaatgtgatcctttttagcgtcttcgacgagaaccggtcctggtacttgaccgagaatatacaaaggttccttcccaaccccgcaggcgttcagttggaagaccctgagtttcaggccagcaatattatgcactcaatcaacggctatgtgtttgatagtctccagctttctgtttgcctccatgaagtagcctattggtacatcttgtcaattggtgctcaaacagacttcctctccgtcttcttctccggctacacctttaagcacaagatggtgtatgaggacactctcacactctttccattttctggagaaaccgtgttcatgagcatggagaatccaggcctttggatcttgggttgccacaacagtgattttcgcaatcggggaatgactgctctcctcaaagtcagcagctgtgataagaacacaggcgactattacgaagattcttacgaggacataagtgcctacttgttgtccaagaataacgccattgagcccagatcattctcccagaatcctcccgtgcttaaaaggcatcagcgcgaaatcaccagaactactcttcagtctgatcaagaggagattgactatgacgacaccataagcgtggaaatgaagaaggaggatttcgatatctatgacgaagatgagaaccagtctccgcggagctttcagaagaagacgcgacactacttcattgcagcagtcgaaaggctttgggactacggtatgtcatcatcccctcatgtgttgcgcaatagagctcagagtggaagtgttccacagttcaagaaagtcgtctttcaagagtttacagatggcagcttcacacagcctctctatcggggcgagcttaacgaacatttgggactccttggtccctatatccgagccgaagtggaggacaacattatggttacctttaggaatcaagcctctcgcccctacagcttctactcctccctcatcagttatgaggaggatcagagacaaggcgctgaaccacggaagaactttgtgaaaccgaatgagacgaagacctacttctggaaagtacagcaccacatggcccccacaaaagacgaattcgattgcaaagcatgggcgtatttttcagacgttgacttggagaaagatgtacattcaggacttattggtcctttgttggtgtgtcacactaacactctcaatccagcccatggcaggcaggtgacagtccaggaattcgctcttttctttaccatctttgatgagaccaagtcctggtacttcacggaaaacatggagcgcaattgcagagccccctgtaacatacagatggaggaccctacctttaaggaaaattatcggttccacgcaatcaacggatacattatggatacactccctggccttgtgatggctcaggaccaacgaatcaggtggtacctcctcagcatgggttctaatgagaacatacactccattcacttttcaggacatgtgttcactgtccggaagaaagaagagtataagatggccctctacaatttgtatccaggcgtgtttgagaccgttgaaatgcttccctctaaagctggcatctggagagtagagtgcttgatcggagaacatcttcacgcaggtatgagcaccttgttcctcgtgtacagcaacaaatgtcagaccccacttggcatggccagtggacacattcgcgactttcagatcacagcatctggccagtatggacaatgggccccaaagttggctcgcctccattactccggtagcataaatgcgtggtccactaaagaacctttcagctggattaaggtcgatcttcttgcccccatgatcatccacggcattaagacacagggagcgaggcagaaattctcctccctctacatctcacagttcattattatgtatagtttggacggcaagaagtggcaaacttatagaggtaacagtactggaacactcatggtgttcttcggcaacgttgatagctctggcatcaaacacaacatctttaatcctcccataatagctcggtacatcagattgcatccgacccactacagcattaggagtacactccgaatggagcttatgggttgcgacttgaattcctgttcaatgccactcggaatggagtctaaagccatctctgatgcacagataaccgccagtagctactttacgaacatgtttgctacgtggtcaccctctaaggcaaggcttcatttgcaaggccggtctaatgcctggagacctcaggtgaacaacccgaaagaatggctccaggtggactttcagaagaccatgaaagtaacaggtgtcactactcagggagttaagtccttgctcaccagcatgtatgtgaaggagttccttatttcctcatcacaagatggccaccagtggaccctcttctttcagaatggtaaggtcaaagtgtttcagggcaatcaagacagcttcacacccgtggtgaacagtcttgatcctccactcttgacacgataccttcgaatccatccacagtcttgggttcaccagattgcattgcgcatggaagtacttggatgcgaggctcaggacctctac

SEQ ID NO: 2832 - protein, 1457 aa, synthetic construct
  REGION 1..1457: note = Variant of human B-domain deleted Factor VIII
MQIELSTCFFLCLLRFCFSATRRYYLGAVELSWDYMQSDLGELPVDARFPPRVPKSFPFNTSVVYKKTLFVEFTDHLFNIAKPRPPWMGLLGPTIQAEVYDTVVITLKNMASHPVSLHAVGVSYWKASEGAEYDDQTSQREKEDDKVFPGGSHTYVWQVLKENGPMASDPLCLTYSYLSHVDLVKDLNSGLIGALLVCREGSLAKEKTQTLHKFILLFAVFDEGKSWHSETKNSLMQDRDAASARAWPKMHTVNGYVNRSLPGLIGCHRKSVYWHVIGMGTTPEVHSIFLEGHTFLVRNHRQASLEISPITFLTAQTLLMDLGQFLLFCHISSHQHDGMEAYVKVDSCPEEPQLRMKNNEEAEDYDDDLTDSEMDVVRFDDDNSPSFIQGRSVAKKHPKTWVHYIAAEEEDWDYAPLVLAPDDRSYKSQYLNNGPQRIGRKYKKVRFMAYTDETFKTREAIQHESGILGPLLYGEVGDTLLIIFKNQASRPYNIYPHGITDVRPLYSRRLPKGVKHLKDFPILPGEIFKYKWTVTVEDGPTKSDPRCLTRYYSSFVNMERDLASGLIGPLLICYKESVDQRGNQIMSDKRNVILFSVFDENRSWYLTENIQRFLPNPAGVQLEDPEFQASNIMHSINGYVFDSLQLSVCLHEVAYWYILSIGAQTDFLSVFFSGYTFKHKMVYEDTLTLFPFSGETVFMSMENPGLWILGCHNSDFRNRGMTALLKVSSCDKNTGDYYEDSYEDISAYLLSKNNAIEPRSFSQNPPVLKRHQREITRTTLQSDQEEIDYDDTISVEMKKEDFDIYDEDENQSPRSFQKKTRHYFIAAVERLWDYGMSSSPHVLRNRAQSGSVPQFKKVVFQEFTDGSFTQPLYRGELNEHLGLLGPYIRAEVEDNIMVTFRNQASRPYSFYSSLISYEEDQRQGAEPRKNFVKPNETKTYFWKVQHHMAPTKDEFDCKAWAYFSDVDLEKDVHSGLIGPLLVCHTNTLNPAHGRQVTVQEFALFFTIFDETKSWYFTENMERNCRAPCNIQMEDPTFKENYRFHAINGYIMDTLPGLVMAQDQRIRWYLLSMGSNENIHSIHFSGHVFTVRKKEEYKMALYNLYPGVFETVEMLPSKAGIWRVECLIGEHLHAGMSTLFLVYSNKCQTPLGMASGHIRDFQITASGQYGQWAPKLARLHYSGSINAWSTKEPFSWIKVDLLAPMIIHGIKTQGARQKFSSLYISQFIIMYSLDGKKWQTYRGNSTGTLMVFFGNVDSSGIKHNIFNPPIIARYIRLHPTHYSIRSTLRMELMGCDLNSCSMPLGMESKAISDAQITASSYFTNMFATWSPSKARLHLQGRSNAWRPQVNNPKEWLQVDFQKTMKVTGVTTQGVKSLLTSMYVKEFLISSSQDGHQWTLFFQNGKVKVFQGNQDSFTPVVNSLDPPLLTRYLRIHPQSWVHQIALRMEVLGCEAQDLY

SEQ ID NO: 2833 - DNA, 4371 bp, synthetic construct
  misc_feature 1..4371: note = Variant of human B-domain deleted Factor VIII
  source 1..4371: mol_type = other DNA
atgcagattgaactgtctacctgcttcttcctctgtttgctgaggttctgctttagcgccactagacggtactaccttggcgctgtggagctgtcctgggactatatgcagagtgatttgggagagcttcccgtcgacgcacgatttcctcctcgcgttccaaagtcatttcccttcaacacaagcgtggtgtacaagaagacgctcttcgtcgaattcaccgatcacctgttcaatatcgccaaacccagaccaccatggatgggtcttttggggcctaccatacaagcggaggtgtatgacacagttgttatcactctcaagaacatggcttctcatccggtaagtcttcacgcagtgggcgtgtcctactggaaagcttcagaaggagccgagtatgatgatcagacatcccagagggagaaagaagacgacaaggtatttccaggtgggtctcatacctatgtgtggcaagtgctcaaagagaatggccctatggcaagcgatccggcttgtttgacttacagctacctttcacacgttgacctcgtcaaggacctcaactccgggttgattggagccttgttggtatgcagggaaggatctcttgccaaagagaagacacagaccctccacaagtttatccttctctttgctgtgttcgatgagggcaaaagttggcatagcgaaacgaagaattccctcatgcaggatcgcgacgcagccagcgccagagcttggcccaagatgcacactgtgaacggatatgtcaataggtcacttcctggcttgattgggtgtcatcggaaaagtgtctactggcacgtgatcggaatggggacaacaccagaggtccactccatatttctcgaaggccataccttccttgttcgaaaccacagacaggcatccttggagatctctcccattacctttctcactgcccaaacgctccttatggacttgggtcagttccttctcttctgccatatcagctcacaccagcatgatggtatggaagcttatgtgaaagtcgacagttgtcctgaggagccacagttgcgcatgaagaataatgaagaagccgaggattacgacgacgatctcaccgattctgagatggacgtggtgaggtttgatgacgacaactctccctccttcattcaaatccggagcgtggcgaagaaacaccccaagacttgggtccactatatagcggcggaagaggaggattgggattacgctcctcttgtattggcaccagatgaccgctcatacaaaagccagtacctcaacaacggaccgcagagaattggccggaagtataagaaagtgcgatttatggcctatacagacgaaacctttaagacaagggaggccatccagcatgagagtgggattttgggacctcttctttacggcgaagttggtgataccctcctcatcatcttcaagaatcaagcttctcgcccctataacatttacccacacgggatcactgacgttaggcctttgtatagcagaagacttcccaaaggcgtgaagcatctcaaagacttccccattttgccaggcgagatctttaagtacaaatggaccgtcacagtggaagatggaccgactaaatcagaccctcgatgccttacgcggtactattcctccttcgtgaatatggagagagatttggcaagcggactcataggaccactcctcatctgttacaaggaatctgtagaccagaggggtaaccagattatgagtgataaacgcaatgtgatcctttttagcgtcttcgacgagaaccggtcctggtacttgaccgagaatatacaaaggttccttcccaaccccgcaggcgttcagttggaagaccctgagtttcaggccagcaatattatgcactcaatcaacggctatgtgtttgatagtctccagctttctgtttgcctccatgaagtagcctattggtacatcttgtcaattggtgctcaaacagacttcctctccgtcttcttctccggctacacctttaagcacaagatggtgtatgaggacactctcacactctttccattttctggagaaaccgtgttcatgagcatggagaatccaggcctttggatcttgggttgccacaacagtgattttcgcaatcggggaatgactgctctcctcaaagtcagcagctgtgataagaacacaggcgactattacgaagattcttacgaggacataagtgcctacttgttgtccaagaataacgccattgagcccagatcattctcccagaatcctcccgtgcttaaaaggcatcagcgcgaaatcaccagaactactcttcagtctgatcaagaggagattgactatgacgacaccataagcgtggaaatgaagaaggaggatttcgatatctatgacgaagatgagaaccagtctccgcggagctttcagaagaagacgcgacactacttcattgcagcagtcgaaaggctttgggactacggtatgtcatcatcccctcatgtgttgcgcaatagagctcagagtggaagtgttccacagttcaagaaagtcgtctttcaagagtttacagatggcagcttcacacagcctctctatcggggcgagcttaacgaacatttgggactccttggtccctatatccgagccgaagtggaggacaacattatggttacctttaggaatcaagcctctcgcccctacagcttctactcctccctcatcagttatgaggaggatcagagacaaggcgctgaaccacggaagaactttgtgaaaccgaatgagacgaagacctacttctggaaagtacagcaccacatggcccccacaaaagacgaattcgattgcaaagcatgggcgtatttttcagacgttgacttggagaaagatgtacattcaggacttattggtcctttgttggtgtgtcacactaacactctcaatccagcccatggcaggcaggtgacagtccaggaattcgctcttttctttaccatctttgatgagaccaagtcctggtacttcacggaaaacatggagcgcaattgcagagccccctgtaacatacagatggaggaccctacctttaaggaaaattatcggttccacgcaatcaacggatacattatggatacactccctggccttgtgatggctcaggaccaacgaatcaggtggtacctcctcagcatgggttctaatgagaacatacactccattcacttttcaggacatgtgttcactgtccggaagaaagaagagtataagatggccctctacaatttgtatccaggcgtgtttgagaccgttgaaatgcttccctctaaagctggcatctggagagtagagtgcttgatcggagaacatcttcacgcaggtatgagcaccttgttcctcgtgtacagcaacaaatgtcagaccccacttggcatggccagtggacacattcgcgactttcagatcacagcatctggccagtatggacaatgggccccaaagttggctcgcctccattactccggtagcataaatgcgtggtccactaaagaacctttcagctggattaaggtcgatcttcttgcccccatgatcatccacggcattaagacacagggagcgaggcagaaattctcctccctctacatctcacagttcattattatgtatagtttggacggcaagaagtggcaaacttatagaggtaacagtactggaacactcatggtgttcttcggcaacgttgatagctctggcatcaaacacaacatctttaatcctcccataatagctcggtacatcagattgcatccgacccactacagcattaggagtacactccgaatggagcttatgggttgcgacttgaattcctgttcaatgccactcggaatggagtctaaagccatctctgatgcacagataaccgccagtagctactttacgaacatgtttgctacgtggtcaccctctaaggcaaggcttcatttgcaaggccggtctaatgcctggagacctcaggtgaacaacccgaaagaatggctccaggtggactttcagaagaccatgaaagtaacaggtgtcactactcagggagttaagtccttgctcaccagcatgtatgtgaaggagttccttatttcctcatcacaagatggccaccagtggaccctcttctttcagaatggtaaggtcaaagtgtttcagggcaatcaagacagcttcacacccgtggtgaacagtcttgatcctccactcttgacacgataccttcgaatccatccacagtcttgggttcaccagattgcattgcgcatggaagtacttggatgcgaggctcaggacctctac

SEQ ID NO: 2834 - protein, 1457 aa, synthetic construct
  REGION 1..1457: note = Variant of human B-domain deleted Factor VIII
MQIELSTCFFLCLLRFCFSATRRYYLGAVELSWDYMQSDLGELPVDARFPPRVPKSFPFNTSVVYKKTLFVEFTDHLFNIAKPRPPWMGLLGPTIQAEVYDTVVITLKNMASHPVSLHAVGVSYWKASEGAEYDDQTSQREKEDDKVFPGGSHTYVWQVLKENGPMASDPACLTYSYLSHVDLVKDLNSGLIGALLVCREGSLAKEKTQTLHKFILLFAVFDEGKSWHSETKNSLMQDRDAASARAWPKMHTVNGYVNRSLPGLIGCHRKSVYWHVIGMGTTPEVHSIFLEGHTFLVRNHRQASLEISPITFLTAQTLLMDLGQFLLFCHISSHQHDGMEAYVKVDSCPEEPQLRMKNNEEAEDYDDDLTDSEMDVVRFDDDNSPSFIQIRSVAKKHPKTWVHYIAAEEEDWDYAPLVLAPDDRSYKSQYLNNGPQRIGRKYKKVRFMAYTDETFKTREAIQHESGILGPLLYGEVGDTLLIIFKNQASRPYNIYPHGITDVRPLYSRRLPKGVKHLKDFPILPGEIFKYKWTVTVEDGPTKSDPRCLTRYYSSFVNMERDLASGLIGPLLICYKESVDQRGNQIMSDKRNVILFSVFDENRSWYLTENIQRFLPNPAGVQLEDPEFQASNIMHSINGYVFDSLQLSVCLHEVAYWYILSIGAQTDFLSVFFSGYTFKHKMVYEDTLTLFPFSGETVFMSMENPGLWILGCHNSDFRNRGMTALLKVSSCDKNTGDYYEDSYEDISAYLLSKNNAIEPRSFSQNPPVLKRHQREITRTTLQSDQEEIDYDDTISVEMKKEDFDIYDEDENQSPRSFQKKTRHYFIAAVERLWDYGMSSSPHVLRNRAQSGSVPQFKKVVFQEFTDGSFTQPLYRGELNEHLGLLGPYIRAEVEDNIMVTFRNQASRPYSFYSSLISYEEDQRQGAEPRKNFVKPNETKTYFWKVQHHMAPTKDEFDCKAWAYFSDVDLEKDVHSGLIGPLLVCHTNTLNPAHGRQVTVQEFALFFTIFDETKSWYFTENMERNCRAPCNIQMEDPTFKENYRFHAINGYIMDTLPGLVMAQDQRIRWYLLSMGSNENIHSIHFSGHVFTVRKKEEYKMALYNLYPGVFETVEMLPSKAGIWRVECLIGEHLHAGMSTLFLVYSNKCQTPLGMASGHIRDFQITASGQYGQWAPKLARLHYSGSINAWSTKEPFSWIKVDLLAPMIIHGIKTQGARQKFSSLYISQFIIMYSLDGKKWQTYRGNSTGTLMVFFGNVDSSGIKHNIFNPPIIARYIRLHPTHYSIRSTLRMELMGCDLNSCSMPLGMESKAISDAQITASSYFTNMFATWSPSKARLHLQGRSNAWRPQVNNPKEWLQVDFQKTMKVTGVTTQGVKSLLTSMYVKEFLISSSQDGHQWTLFFQNGKVKVFQGNQDSFTPVVNSLDPPLLTRYLRIHPQSWVHQIALRMEVLGCEAQDLY

SEQ ID NO: 2835 - DNA, 4371 bp, synthetic construct
  misc_feature 1..4371: note = Variant of human B-domain deleted Factor VIII
  source 1..4371: mol_type = other DNA
atgcagattgaactgtctacctgcttcttcctctgtttgctgaggttctgctttagcgccactagacggtactaccttggcgctgtggagctgtcctgggactatatgcagagtgatttgggagagcttcccgtcgacgcacgatttcctcctcgcgttccaaagtcatttcccttcaacacaagcgtggtgtacaagaagacgctcttcgtcgaattcaccgatcacctgttcaatatcgccaaacccagaccaccatggatgggtcttttggggcctaccatacaagcggaggtgtatgacacagttgttatcactctcaagaacatggcttctcatccggtaagtcttcacgcagtgggcgtgtcctactggaaagcttcagaaggagccgagtatgatgatcagacatcccagagggagaaagaagacgacaaggtatttccaggtgggtctcatacctatgtgtggcaagtgctcaaagagaatggccctatggcaagcgatccgctctgtttgacttacagctacctttcacacgttgacctcgtcaaggacctcaactccgggttgattggagccttgttggtatgcagggaaggatctcttgccaaagagaagacacagaccctccacaagtttatccttctctttgctgtgttcgatgagggcaaaagttggcatagcgaaacgaagaattccctcatgcaggatcgcgacgcagccagcgccagagcttggcccaagatgcacactgtgaacggatatgtcaataggtcacttcctggcttgattgggtgtcatcggaaaagtgtctactggcacgtgatcggaatggggacaacaccagaggtccactccatatttctcgaaggccataccttccttgttcgaaaccacagacaggcatccttggagatctctcccattacctttctcactgcccaaacgctccttatggacttgggtcagttccttctcttctgccatatcagctcacaccagcatgatggtatggaagcttatgtgaaagtcgacagttgtcctgaggagccacagttgcgcatgaagaataatgaagaagccgaggattacgacgacgatctcaccgattctgagatggacgtggtgaggtttgatgacgacaactctccctccttcattcaaatccggagcgtggcgaagaaacaccccaagacttgggtccactatatagcggcggaagaggaggattgggattacgctcctcttgtattggcaccagatgaccgctcatacaaaagccagtacctcaacaacggaccgcagagaattggccggaagtataagaaagtgcgatttatggcctatacagacgaaacctttaagacaagggaggccatccagcatgagagtgggattttgggacctcttctttacggcgaagttggtgataccctcctcatcatcttcaagaatcaagcttctcgcccctataacatttacccacacgggatcactgacgttaggcctttgtatagcagaagacttcccaaaggcgtgaagcatctcaaagacttccccattttgccaggcgagatctttaagtacaaatggaccgtcacagtggaagatggaccgactaaatcagaccctcgatgccttacgcggtactattcctccttcgtgaatatggagagagatttggcaagcggactcataggaccactcctcatctgttacaaggaatctgtagaccagaggggtaaccagattatgagtgataaacgcaatgtgatcctttttagcgtcttcgacgagaaccggtcctggtacttgaccgagaatatacaaaggttccttcccaaccccgcaggcgttcagttggaagaccctgagtttcaggccagcaatattatgcactcaatcaacggctatgtgtttgatagtctccagctttctgtttgcctccatgaagtagcctattggtacatcttgtcaattggtgctcaaacagacttcctctccgtcttcttctccggctacacctttaagcacaagatggtgtatgaggacactctcacactctttccattttctggagaaaccgtgttcatgagcatggagaatccaggcctttggatcttgggttgccacaacagtgattttcgcaatcggggaatgactgctctcctcaaagtcagcagctgtgataagaacacaggcgactattacgaagattcttacgaggacataagtgcctacttgttgtccaagaataacgccattgagcccagatcattctcccagaatcctcccgtgcttaaaaggcatcagcgcgaaatcaccagaactactcttcagtctgatcaagaggagattgactatgacgacaccataagcgtggaaatgaagaaggaggatttcgatatctatgacgaagatgagaaccagtctccgcggagctttcagaagaagacgcgacactacttcattgcagcagtcgaaaggctttgggactacggtatgtcatcatcccctcatgtgttgcgcaatagagctcagagtggaagtgttccacagttcaagaaagtcgtctttcaagagtttacagatggcagcttcacacagcctctctatcggggcgagcttaacgaacatttgggactccttggtccctatatccgagccgaagtggaggacaacattatggttacctttaggaatcaagcctctcgcccctacagcttctactcctccctcatcagttatgaggaggatcagagacaaggcgctgaaccacggaagaactttgtgaaaccgaatgagacgaagacctacttctggaaagtacagcaccacatggcccccacaaaagacgaattcgattgcaaagcatgggcgtatttttcagacgttgacttggagaaagatgtacattcaggacttattggtcctttgttggtgtgtcacactaacactctcaatccagcccatggcaggcaggtgacagtccaggaattcgctcttttctttaccatctttgatgagaccaagtcctggtacttcacggaaaacatggagcgcaattgcagagccccctgtaacatacagatggaggaccctacctttaaggaaaattatcggttccacgcaatcaacggatacattatggatacactccctggccttgtgatggctcaggaccaacgaatcaggtggtacctcctcagcatgggttctaatgagaacatacactccattcacttttcaggacatgtgttcactgtccggaagaaagaagagtataagatggccctctacaatttgtatccaggcgtgtttgagaccgttgaaatgcttccctctaaagctggcatctggagagtagagtgcttgatcggagaacatcttcacgcaggtatgagcaccttgttcctcgtgtacagcaacaaatgtcagaccccacttggcatggccagtggacacattcgcgactttcagatcacagcatctggccagtatggacaatgggccccaaagttggctcgcctccattactccggtagcataaatgcgtggtccactaaagaacctttcagctggattaaggtcgatcttcttgcccccatgatcatccacggcattaagacacagggagcgaggcagaaattctcctccctctacatctcacagttcattattatgtatagtttggacggcaagaagtggcaaacttatagaggtaacagtactggaacaacgatggtgttcttcggcaacgttgatagctctggcatcaaacacaacatctttaatcctcccataatagctcggtacatcagattgcatccgacccactacagcattaggagtacactccgaatggagcttatgggttgcgacttgaattcctgttcaatgccactcggaatggagtctaaagccatctctgatgcacagataaccgccagtagctactttacgaacatgtttgctacgtggtcaccctctaaggcaaggcttcatttgcaaggccggtctaatgcctggagacctcaggtgaacaacccgaaagaatggctccaggtggactttcagaagaccatgaaagtaacaggtgtcactactcagggagttaagtccttgctcaccagcatgtatgtgaaggagttccttatttcctcatcacaagatggccaccagtggaccctcttctttcagaatggtaaggtcaaagtgtttcagggcaatcaagacagcttcacacccgtggtgaacagtcttgatcctccactcttgacacgataccttcgaatccatccacagtcttgggttcaccagattgcattgcgcatggaagtacttggatgcgaggctcaggacctctac

SEQ ID NO: 2836 - protein, 1457 aa, synthetic construct
  REGION 1..1457: note = Variant of human B-domain deleted Factor VIII
MQIELSTCFFLCLLRFCFSATRRYYLGAVELSWDYMQSDLGELPVDARFPPRVPKSFPFNTSVVYKKTLFVEFTDHLFNIAKPRPPWMGLLGPTIQAEVYDTVVITLKNMASHPVSLHAVGVSYWKASEGAEYDDQTSQREKEDDKVFPGGSHTYVWQVLKENGPMASDPLCLTYSYLSHVDLVKDLNSGLIGALLVCREGSLAKEKTQTLHKFILLFAVFDEGKSWHSETKNSLMQDRDAASARAWPKMHTVNGYVNRSLPGLIGCHRKSVYWHVIGMGTTPEVHSIFLEGHTFLVRNHRQASLEISPITFLTAQTLLMDLGQFLLFCHISSHQHDGMEAYVKVDSCPEEPQLRMKNNEEAEDYDDDLTDSEMDVVRFDDDNSPSFIQIRSVAKKHPKTWVHYIAAEEEDWDYAPLVLAPDDRSYKSQYLNNGPQRIGRKYKKVRFMAYTDETFKTREAIQHESGILGPLLYGEVGDTLLIIFKNQASRPYNIYPHGITDVRPLYSRRLPKGVKHLKDFPILPGEIFKYKWTVTVEDGPTKSDPRCLTRYYSSFVNMERDLASGLIGPLLICYKESVDQRGNQIMSDKRNVILFSVFDENRSWYLTENIQRFLPNPAGVQLEDPEFQASNIMHSINGYVFDSLQLSVCLHEVAYWYILSIGAQTDFLSVFFSGYTFKHKMVYEDTLTLFPFSGETVFMSMENPGLWILGCHNSDFRNRGMTALLKVSSCDKNTGDYYEDSYEDISAYLLSKNNAIEPRSFSQNPPVLKRHQREITRTTLQSDQEEIDYDDTISVEMKKEDFDIYDEDENQSPRSFQKKTRHYFIAAVERLWDYGMSSSPHVLRNRAQSGSVPQFKKVVFQEFTDGSFTQPLYRGELNEHLGLLGPYIRAEVEDNIMVTFRNQASRPYSFYSSLISYEEDQRQGAEPRKNFVKPNETKTYFWKVQHHMAPTKDEFDCKAWAYFSDVDLEKDVHSGLIGPLLVCHTNTLNPAHGRQVTVQEFALFFTIFDETKSWYFTENMERNCRAPCNIQMEDPTFKENYRFHAINGYIMDTLPGLVMAQDQRIRWYLLSMGSNENIHSIHFSGHVFTVRKKEEYKMALYNLYPGVFETVEMLPSKAGIWRVECLIGEHLHAGMSTLFLVYSNKCQTPLGMASGHIRDFQITASGQYGQWAPKLARLHYSGSINAWSTKEPFSWIKVDLLAPMIIHGIKTQGARQKFSSLYISQFIIMYSLDGKKWQTYRGNSTGTTMVFFGNVDSSGIKHNIFNPPIIARYIRLHPTHYSIRSTLRMELMGCDLNSCSMPLGMESKAISDAQITASSYFTNMFATWSPSKARLHLQGRSNAWRPQVNNPKEWLQVDFQKTMKVTGVTTQGVKSLLTSMYVKEFLISSSQDGHQWTLFFQNGKVKVFQGNQDSFTPVVNSLDPPLLTRYLRIHPQSWVHQIALRMEVLGCEAQDLY

SEQ ID NO: 2837 - DNA, 4371 bp, synthetic construct
  misc_feature 1..4371: note = Variant of human B-domain deleted Factor VIII
  source 1..4371: mol_type = other DNA
atgcagattgaactgtctacctgcttcttcctctgtttgctgaggttctgctttagcgccactagacggtactaccttggcgctgtggagctgtcctgggactatatgcagagtgatttgggagagcttcccgtcgacgcacgatttcctcctcgcgttccaaagtcatttcccttcaacacaagcgtggtgtacaagaagacgctcttcgtcgaattcaccgatcacctgttcaatatcgccaaacccagaccaccatggatgggtcttttggggcctaccatacaagcggaggtgtatgacacagttgttatcactctcaagaacatggcttctcatccggtaagtcttcacgcagtgggcgtgtcctactggaaagcttcagaaggagccgagtatgatgatcagacatcccagagggagaaagaagacgacaaggtatttccaggtgggtctcatacctatgtgtggcaagtgctcaaagagaatggccctatggcaagcgatccgctctgtttgacttacagctacctttcacacgttgacctcgtcaaggacctcaactccgggttgattggagccttgttggtatgcagggaaggatctcttgccaaagagaagacacagaccctccacaagtttatccttctctttgctgtgttcgatgagggcaaaagttggcatagcgaaacgaagaattccctcatgcaggatcgcgacgcagccagcgccagagcttggcccaagatgcacactgtgaacggatatgtcaataggtcacttcctggcttgattgggtgtcatcggaaaagtgtctactggcacgtgatcggaatggggacaacaccagaggtccactccatatttctcgaaggccataccttccttgttcgaaaccacagacaggcatccttggagatctctcccattacctttctcactgcccaaacgctccttatggacttgggtcagttccttctcttctgccatatcagctcacaccagcatgatggtatggaagcttatgtgaaagtcgacagttgtcctgaggagccacagttgcgcatgaagaataatgaagaagccgaggattacgacgacgatctcaccgattctgagatggacgtggtgaggtttgatgacgacaactctccctccttcattcaaatccggagcatggcgaagaaacaccccaagacttgggtccactatatagcggcggaagaggaggattgggattacgctcctcttgtattggcaccagatgaccgctcatacaaaagccagtacctcaacaacggaccgcagagaattggccggaagtataagaaagtgcgatttatggcctatacagacgaaacctttaagacaagggaggccatccagcatgagagtgggattttgggacctcttctttacggcgaagttggtgataccctcctcatcatcttcaagaatcaagcttctcgcccctataacatttacccacacgggatcactgacgttaggcctttgtatagcagaagacttcccaaaggcgtgaagcatctcaaagacttccccattttgccaggcgagatctttaagtacaaatggaccgtcacagtggaagatggaccgactaaatcagaccctcgatgccttacgcggtactattcctccttcgtgaatatggagagagatttggcaagcggactcataggaccactcctcatctgttacaaggaatctgtagaccagaggggtaaccagattatgagtgataaacgcaatgtgatcctttttagcgtcttcgacgagaaccggtcctggtacttgaccgagaatatacaaaggttccttcccaaccccgcaggcgttcagttggaagaccctgagtttcaggccagcaatattatgcactcaatcaacggctatgtgtttgatagtctccagctttctgtttgcctccatgaagtagcctattggtacatcttgtcaattggtgctcaaacagacttcctctccgtcttcttctccggctacacctttaagcacaagatggtgtatgaggacactctcacactctttccattttctggagaaaccgtgttcatgagcatggagaatccaggcctttggatcttgggttgccacaacagtgattttcgcaatcggggaatgactgctctcctcaaagtcagcagctgtgataagaacacaggcgactattacgaagattcttacgaggacataagtgcctacttgttgtccaagaataacgccattgagcccagatcattctcccagaatcctcccgtgcttaaaaggcatcagcgcgaaatcaccagaactactcttcagtctgatcaagaggagattgactatgacgacaccataagcgtggaaatgaagaaggaggatttcgatatctatgacgaagatgagaaccagtctccgcggagctttcagaagaagacgcgacactacttcattgcagcagtcgaaaggctttgggactacggtatgtcatcatcccctcatgtgttgcgcaatagagctcagagtggaagtgttccacagttcaagaaagtcgtctttcaagagtttacagatggcagcttcacacagcctctctatcggggcgagcttaacgaacatttgggactccttggtccctatatccgagccgaagtggaggacaacattatggttacctttaggaatcaagcctctcgcccctacagcttctactcctccctcatcagttatgaggaggatcagagacaaggcgctgaaccacggaagaactttgtgaaaccgaatgagacgaagacctacttctggaaagtacagcaccacatggcccccacaaaagacgaattcgattgcaaagcatgggcgtatttttcagacgttgacttggagaaagatgtacattcaggacttattggtcctttgttggtgtgtcacactaacactctcaatccagcccatggcaggcaggtgacagtccaggaattcgctcttttctttaccatctttgatgagaccaagtcctggtacttcacggaaaacatggagcgcaattgcagagccccctgtaacatacagatggaggaccctacctttaaggaaaattatcggttccacgcaatcaacggatacattatggatacactccctggccttgtgatggctcaggaccaacgaatcaggtggtacctcctcagcatgggttctaatgagaacatacactccattcacttttcaggacatgtgttcactgtccggaagaaagaagagtataagatggccctctacaatttgtatccaggcgtgtttgagaccgttgaaatgcttccctctaaagctggcatctggagagtagagtgcttgatcggagaacatcttcacgcaggtatgagcaccttgttcctcgtgtacagcaacaaatgtcagaccccacttggcatggccagtggacacattcgcgactttcagatcacagcatctggccagtatggacaatgggccccaaagttggctcgcctccattactccggtagcataaatgcgtggtccactaaagaacctttcagctggattaaggtcgatcttcttgcccccatgatcatccacggcattaagacacagggagcgaggcagaaattctcctccctctacatctcacagttcattattatgtatagtttggacggcaagaagtggcaaacttatagaggtaacagtactggaacactcatggtgttcttcggcaacgttgatagctctggcatcaaacacaacatctttaatcctcccataatagctcggtacatcagattgcatccgacccactacagcattaggagtacactccgaatggagcttatgggttgcgacttgaattcctgttcaatgccactcggaatggagtctaaagccatctctgatgcacagataaccgccagtagctactttacgaacatgtttgctacgtggtcaccctctaaggcaaggcttcatttgcaaggccggtctaatgcctggagacctcaggtgaacaacccgaaagaatggctccaggtggactttcagaagaccatgaaagtaacaggtgtcactactcagggagttaagtccttgctcaccagcatgtatgtgaaggagttccttatttcctcatcacaagatggccaccagtggaccctcttctttcagaatggtaaggtcaaagtgtttcagggcaatcaagacagcttcacacccgtggtgaacagtcttgatcctccactcttgacacgataccttcgaatccatccacagtcttgggttcaccagattgcattgcgcatggaagtacttggatgcgaggctcaggacctctac

SEQ ID NO: 2838 - protein, 1457 aa, synthetic construct
  REGION 1..1457: note = Variant of human B-domain deleted Factor VIII
MQIELSTCFFLCLLRFCFSATRRYYLGAVELSWDYMQSDLGELPVDARFPPRVPKSFPFNTSVVYKKTLFVEFTDHLFNIAKPRPPWMGLLGPTIQAEVYDTVVITLKNMASHPVSLHAVGVSYWKASEGAEYDDQTSQREKEDDKVFPGGSHTYVWQVLKENGPMASDPLCLTYSYLSHVDLVKDLNSGLIGALLVCREGSLAKEKTQTLHKFILLFAVFDEGKSWHSETKNSLMQDRDAASARAWPKMHTVNGYVNRSLPGLIGCHRKSVYWHVIGMGTTPEVHSIFLEGHTFLVRNHRQASLEISPITFLTAQTLLMDLGQFLLFCHISSHQHDGMEAYVKVDSCPEEPQLRMKNNEEAEDYDDDLTDSEMDVVRFDDDNSPSFIQIRSMAKKHPKTWVHYIAAEEEDWDYAPLVLAPDDRSYKSQYLNNGPQRIGRKYKKVRFMAYTDETFKTREAIQHESGILGPLLYGEVGDTLLIIFKNQASRPYNIYPHGITDVRPLYSRRLPKGVKHLKDFPILPGEIFKYKWTVTVEDGPTKSDPRCLTRYYSSFVNMERDLASGLIGPLLICYKESVDQRGNQIMSDKRNVILFSVFDENRSWYLTENIQRFLPNPAGVQLEDPEFQASNIMHSINGYVFDSLQLSVCLHEVAYWYILSIGAQTDFLSVFFSGYTFKHKMVYEDTLTLFPFSGETVFMSMENPGLWILGCHNSDFRNRGMTALLKVSSCDKNTGDYYEDSYEDISAYLLSKNNAIEPRSFSQNPPVLKRHQREITRTTLQSDQEEIDYDDTISVEMKKEDFDIYDEDENQSPRSFQKKTRHYFIAAVERLWDYGMSSSPHVLRNRAQSGSVPQFKKVVFQEFTDGSFTQPLYRGELNEHLGLLGPYIRAEVEDNIMVTFRNQASRPYSFYSSLISYEEDQRQGAEPRKNFVKPNETKTYFWKVQHHMAPTKDEFDCKAWAYFSDVDLEKDVHSGLIGPLLVCHTNTLNPAHGRQVTVQEFALFFTIFDETKSWYFTENMERNCRAPCNIQMEDPTFKENYRFHAINGYIMDTLPGLVMAQDQRIRWYLLSMGSNENIHSIHFSGHVFTVRKKEEYKMALYNLYPGVFETVEMLPSKAGIWRVECLIGEHLHAGMSTLFLVYSNKCQTPLGMASGHIRDFQITASGQYGQWAPKLARLHYSGSINAWSTKEPFSWIKVDLLAPMIIHGIKTQGARQKFSSLYISQFIIMYSLDGKKWQTYRGNSTGTLMVFFGNVDSSGIKHNIFNPPIIARYIRLHPTHYSIRSTLRMELMGCDLNSCSMPLGMESKAISDAQITASSYFTNMFATWSPSKARLHLQGRSNAWRPQVNNPKEWLQVDFQKTMKVTGVTTQGVKSLLTSMYVKEFLISSSQDGHQWTLFFQNGKVKVFQGNQDSFTPVVNSLDPPLLTRYLRIHPQSWVHQIALRMEVLGCEAQDLY

SEQ ID NO: 2839 - DNA, 4371 bp, synthetic construct
  misc_feature 1..4371: note = Variant of human B-domain deleted Factor VIII
  source 1..4371: mol_type = other DNA
atgcagattgaactgtctacctgcttcttcctctgtttgctgaggttctgctttagcgccactagacggtactaccttggcgctgtggagctgtcctgggactatatgcagagtgatttgggagagcttcccgtcgacgcacgatttcctcctcgcgttccaaagtcatttcccttcaacacaagcgtggtgtacaagaagacgctcttcgtcgaattcaccgatcacctgttcaatatcgccaaacccagaccaccatggatgggtcttttggggcctaccatacaagcggaggtgtatgacacagttgttatcactctcaagaacatggcttctcatccggtaagtcttcacgcagtgggcgtgtcctactggaaagcttcagaaggagccgagtatgatgatcagacatcccagagggagaaagaagacgacaaggtatttccaggtgggtctcatacctatgtgtggcaagtgctcaaagagaatggccctatggcaagcgatccgagttgtttgacttacagctacctttcacacgttgacctcgtcaaggacctcaactccgggttgattggagccttgttggtatgcagggaaggatctcttgccaaagagaagacacagaccctccacaagtttatccttctctttgctgtgttcgatgagggcaaaagttggcatagcgaaacgaagaattccctcatgcaggatcgcgacgcagccagcgccagagcttggcccaagatgcacactgtgaacggatatgtcaataggtcacttcctggcttgattgggtgtcatcggaaaagtgtctactggcacgtgatcggaatggggacaacaccagaggtccactccatatttctcgaaggccataccttccttgttcgaaaccacagacaggcatccttggagatctctcccattacctttctcactgcccaaacgctccttatggacttgggtcagttccttctcttctgccatatcagctcacaccagcatgatggtatggaagcttatgtgaaagtcgacagttgtcctgaggagccacagttgcgcatgaagaataatgaagaagccgaggattacgacgacgatctcaccgattctgagatggacgtggtgaggtttgatgacgacaactctccctccttcattcaaatccggagcgtggcgaagaaacaccccaagacttgggtccactatatagcggcggaagaggaggattgggattacgctcctcttgtattggcaccagatgaccgctcatacaaaagccagtacctcaacaacggaccgcagagaattggccggaagtataagaaagtgcgatttatggcctatacagacgaaacctttaagacaagggaggccatccagcatgagagtgggattttgggacctcttctttacggcgaagttggtgataccctcctcatcatcttcaagaatcaagcttctcgcccctataacatttacccacacgggatcactgacgttaggcctttgtatagcagaagacttcccaaaggcgtgaagcatctcaaagacttccccattttgccaggcgagatctttaagtacaaatggaccgtcacagtggaagatggaccgactaaatcagaccctcgatgccttacgcggtactattcctccttcgtgaatatggagagagatttggcaagcggactcataggaccactcctcatctgttacaaggaatctgtagaccagaggggtaaccagattatgagtgataaacgcaatgtgatcctttttagcgtcttcgacgagaaccggtcctggtacttgaccgagaatatacaaaggttccttcccaaccccgcaggcgttcagttggaagaccctgagtttcaggccagcaatattatgcactcaatcaacggctatgtgtttgatagtctccagctttctgtttgcctccatgaagtagcctattggtacatcttgtcaattggtgctcaaacagacttcctctccgtcttcttctccggctacacctttaagcacaagatggtgtatgaggacactctcacactctttccattttctggagaaaccgtgttcatgagcatggagaatccaggcctttggatcttgggttgccacaacagtgattttcgcaatcggggaatgactgctctcctcaaagtcagcagctgtgataagaacacaggcgactattacgaagattcttacgaggacataagtgcctacttgttgtccaagaataacgccattgagcccagatcattctcccagaatcctcccgtgcttaaaaggcatcagcgcgaaatcaccagaactactcttcagtctgatcaagaggagattgactatgacgacaccataagcgtggaaatgaagaaggaggatttcgatatctatgacgaagatgagaaccagtctccgcggagctttcagaagaagacgcgacactacttcattgcagcagtcgaaaggctttgggactacggtatgtcatcatcccctcatgtgttgcgcaatagagctcagagtggaagtgttccacagttcaagaaagtcgtctttcaagagtttacagatggcagcttcacacagcctctctatcggggcgagcttaacgaacatttgggactccttggtccctatatccgagccgaagtggaggacaacattatggttacctttaggaatcaagcctctcgcccctacagcttctactcctccctcatcagttatgaggaggatcagagacaaggcgctgaaccacggaagaactttgtgaaaccgaatgagacgaagacctacttctggaaagtacagcaccacatggcccccacaaaagacgaattcgattgcaaagcatgggcgtatttttcagacgttgacttggagaaagatgtacattcaggacttattggtcctttgttggtgtgtcacactaacactctcaatccagcccatggcaggcaggtgacagtccaggaattcgctcttttctttaccatctttgatgagaccaagtcctggtacttcacggaaaacatggagcgcaattgcagagccccctgtaacatacagatggaggaccctacctttaaggaaaattatcggttccacgcaatcaacggatacattatggatacactccctggccttgtgatggctcaggaccaacgaatcaggtggtacctcctcagcatgggttctaatgagaacatacactccattcacttttcaggacatgtgttcactgtccggaagaaagaagagtataagatggccctctacaatttgtatccaggcgtgtttgagaccgttgaaatgcttccctctaaagctggcatctggagagtagagtgcttgatcggagaacatcttcacgcaggtatgagcaccttgttcctcgtgtacagcaacaaatgtcagaccccacttggcatggccagtggacacattcgcgactttcagatcacagcatctggccagtatggacaatgggccccaaagttggctcgcctccattactccggtagcataaatgcgtggtccactaaagaacctttcagctggattaaggtcgatcttcttgcccccatgatcatccacggcattaagacacagggagcgaggcagaaattctcctccctctacatctcacagttcattattatgtatagtttggacggcaagaagtggcaaacttatagaggtaacagtactggaacactcatggtgttcttcggcaacgttgatagctctggcatcaaacacaacatctttaatcctcccataatagctcggtacatcagattgcatccgacccactacagcattaggagtacactccgaatggagcttatgggttgcgacttgaattcctgttcaatgccactcggaatggagtctaaagccatctctgatgcacagataaccgccagtagctactttacgaacatgtttgctacgtggtcaccctctaaggcaaggcttcatttgcaaggccggtctaatgcctggagacctcaggtgaacaacccgaaagaatggctccaggtggactttcagaagaccatgaaagtaacaggtgtcactactcagggagttaagtccttgctcaccagcatgtatgtgaaggagttccttatttcctcatcacaagatggccaccagtggaccctcttctttcagaatggtaaggtcaaagtgtttcagggcaatcaagacagcttcacacccgtggtgaacagtcttgatcctccactcttgacacgataccttcgaatccatccacagtcttgggttcaccagattgcattgcgcatggaagtacttggatgcgaggctcaggacctctac

SEQ ID NO: 2840 - protein, 1457 aa, synthetic construct
  REGION 1..1457: note = Variant of human B-domain deleted Factor VIII
MQIELSTCFFLCLLRFCFSATRRYYLGAVELSWDYMQSDLGELPVDARFPPRVPKSFPFNTSVVYKKTLFVEFTDHLFNIAKPRPPWMGLLGPTIQAEVYDTVVITLKNMASHPVSLHAVGVSYWKASEGAEYDDQTSQREKEDDKVFPGGSHTYVWQVLKENGPMASDPSCLTYSYLSHVDLVKDLNSGLIGALLVCREGSLAKEKTQTLHKFILLFAVFDEGKSWHSETKNSLMQDRDAASARAWPKMHTVNGYVNRSLPGLIGCHRKSVYWHVIGMGTTPEVHSIFLEGHTFLVRNHRQASLEISPITFLTAQTLLMDLGQFLLFCHISSHQHDGMEAYVKVDSCPEEPQLRMKNNEEAEDYDDDLTDSEMDVVRFDDDNSPSFIQIRSVAKKHPKTWVHYIAAEEEDWDYAPLVLAPDDRSYKSQYLNNGPQRIGRKYKKVRFMAYTDETFKTREAIQHESGILGPLLYGEVGDTLLIIFKNQASRPYNIYPHGITDVRPLYSRRLPKGVKHLKDFPILPGEIFKYKWTVTVEDGPTKSDPRCLTRYYSSFVNMERDLASGLIGPLLICYKESVDQRGNQIMSDKRNVILFSVFDENRSWYLTENIQRFLPNPAGVQLEDPEFQASNIMHSINGYVFDSLQLSVCLHEVAYWYILSIGAQTDFLSVFFSGYTFKHKMVYEDTLTLFPFSGETVFMSMENPGLWILGCHNSDFRNRGMTALLKVSSCDKNTGDYYEDSYEDISAYLLSKNNAIEPRSFSQNPPVLKRHQREITRTTLQSDQEEIDYDDTISVEMKKEDFDIYDEDENQSPRSFQKKTRHYFIAAVERLWDYGMSSSPHVLRNRAQSGSVPQFKKVVFQEFTDGSFTQPLYRGELNEHLGLLGPYIRAEVEDNIMVTFRNQASRPYSFYSSLISYEEDQRQGAEPRKNFVKPNETKTYFWKVQHHMAPTKDEFDCKAWAYFSDVDLEKDVHSGLIGPLLVCHTNTLNPAHGRQVTVQEFALFFTIFDETKSWYFTENMERNCRAPCNIQMEDPTFKENYRFHAINGYIMDTLPGLVMAQDQRIRWYLLSMGSNENIHSIHFSGHVFTVRKKEEYKMALYNLYPGVFETVEMLPSKAGIWRVECLIGEHLHAGMSTLFLVYSNKCQTPLGMASGHIRDFQITASGQYGQWAPKLARLHYSGSINAWSTKEPFSWIKVDLLAPMIIHGIKTQGARQKFSSLYISQFIIMYSLDGKKWQTYRGNSTGTLMVFFGNVDSSGIKHNIFNPPIIARYIRLHPTHYSIRSTLRMELMGCDLNSCSMPLGMESKAISDAQITASSYFTNMFATWSPSKARLHLQGRSNAWRPQVNNPKEWLQVDFQKTMKVTGVTTQGVKSLLTSMYVKEFLISSSQDGHQWTLFFQNGKVKVFQGNQDSFTPVVNSLDPPLLTRYLRIHPQSWVHQIALRMEVLGCEAQDLY

SEQ ID NO: 2841 - DNA, 4371 bp, synthetic construct
  misc_feature 1..4371: note = Variant of human B-domain deleted Factor VIII
  source 1..4371: mol_type = other DNA
atgcagattgaactgtctacctgcttcttcctctgtttgctgaggttctgctttagcgccactagacggtactaccttggcgctgtggagctgtcctgggactatatgcagagtgatttgggagagcttcccgtcgacgcacgatttcctcctcgcgttccaaagtcatttcccttcaacacaagcgtggtgtacaagaagacgctcttcgtcgaattcaccgatcacctgttcaatatcgccaaacccagaccaccatggatgggtcttttggggcctaccatacaagcggaggtgtatgacacagttgttatcactctcaagaacatggcttctcatccggtaagtcttcacgcagtgggcgtgtcctactggaaagcttcagaaggagccgagtatgatgatcagacatcccagagggagaaagaagacgacaaggtatttccaggtgggtctcatacctatgtgtggcaagtgctcaaagagaatggccctatggcaagcgatccgctctgtttgacttacagctacctttcacacgttgacctcgtcaaggacctcaactccgggttgattggagccttgttggtatgcagggaaggatctcttgccaaagagaagacacagaccctccacaagtttatccttctctttgctgtgttcgatgagggcaaaagttggcatagcgaaacgaagaattccctcatgcaggatcgcgacgcagccagcgccagagcttggcccaagatgcacactgtgaacggatatgtcaataggtcacttcctggcttgattgggtgtcatcggaaaagtgtctactggcacgtgatcggaatggggacaacaccagaggtccactccatatttctcgaaggccataccttccttgttcgaaaccacagacaggcatccttggatatctctcccattacctttctcactgcccaaacgctccttatggacttgggtcagttccttctcttctgccatatcagctcacaccagcatgatggtatggaagcttatgtgaaagtcgacagttgtcctgaggagccacagttgcgcatgaagaataatgaagaagccgaggattacgacgacgatctcaccgattctgagatggacgtggtgaggtttgatgacgacaactctccctccttcattcaaatccggagcgtggcgaagaaacaccccaagacttgggtccactatatagcggcggaagaggaggattgggattacgctcctcttgtattggcaccagatgaccgctcatacaaaagccagtacctcaacaacggaccgcagagaattggccggaagtataagaaagtgcgatttatggcctatacagacgaaacctttaagacaagggaggccatccagcatgagagtgggattttgggacctcttctttacggcgaagttggtgataccctcctcatcatcttcaagaatcaagcttctcgcccctataacatttacccacacgggatcactgacgttaggcctttgtatagcagaagacttcccaaaggcgtgaagcatctcaaagacttccccattttgccaggcgagatctttaagtacaaatggaccgtcacagtggaagatggaccgactaaatcagaccctcgatgccttacgcggtactattcctccttcgtgaatatggagagagatttggcaagcggactcataggaccactcctcatctgttacaaggaatctgtagaccagaggggtaaccagattatgagtgataaacgcaatgtgatcctttttagcgtcttcgacgagaaccggtcctggtacttgaccgagaatatacaaaggttccttcccaaccccgcaggcgttcagttggaagaccctgagtttcaggccagcaatattatgcactcaatcaacggctatgtgtttgatagtctccagctttctgtttgcctccatgaagtagcctattggtacatcttgtcaattggtgctcaaacagacttcctctccgtcttcttctccggctacacctttaagcacaagatggtgtatgaggacactctcacactctttccattttctggagaaaccgtgttcatgagcatggagaatccaggcctttggatcttgggttgccacaacagtgattttcgcaatcggggaatgactgctctcctcaaagtcagcagctgtgataagaacacaggcgactattacgaagattcttacgaggacataagtgcctacttgttgtccaagaataacgccattgagcccagatcattctcccagaatcctcccgtgcttaaaaggcatcagcgcgaaatcaccagaactactcttcagtctgatcaagaggagattgactatgacgacaccataagcgtggaaatgaagaaggaggatttcgatatctatgacgaagatgagaaccagtctccgcggagctttcagaagaagacgcgacactacttcattgcagcagtcgaaaggctttgggactacggtatgtcatcatcccctcatgtgttgcgcaatagagctcagagtggaagtgttccacagttcaagaaagtcgtctttcaagagtttacagatggcagcttcacacagcctctctatcggggcgagcttaacgaacatttgggactccttggtccctatatccgagccgaagtggaggacaacattatggttacctttaggaatcaagcctctcgcccctacagcttctactcctccctcatcagttatgaggaggatcagagacaaggcgctgaaccacggaagaactttgtgaaaccgaatgagacgaagacctacttctggaaagtacagcaccacatggcccccacaaaagacgaattcgattgcaaagcatgggcgtatttttcagacgttgacttggagaaagatgtacattcaggacttattggtcctttgttggtgtgtcacactaacactctcaatccagcccatggcaggcaggtgacagtccaggaattcgctcttttctttaccatctttgatgagaccaagtcctggtacttcacggaaaacatggagcgcaattgcagagccccctgtaacatacagatggaggaccctacctttaaggaaaattatcggttccacgcaatcaacggatacattatggatacactccctggccttgtgatggctcaggaccaacgaatcaggtggtacctcctcagcatgggttctaatgagaacatacactccattcacttttcaggacatgtgttcactgtccggaagaaagaagagtataagatggccctctacaatttgtatccaggcgtgtttgagaccgttgaaatgcttccctctaaagctggcatctggagagtagagtgcttgatcggagaacatcttcacgcaggtatgagcaccttgttcctcgtgtacagcaacaaatgtcagaccccacttggcatggccagtggacacattcgcgactttcagatcacagcatctggccagtatggacaatgggccccaaagttggctcgcctccattactccggtagcataaatgcgtggtccactaaagaacctttcagctggattaaggtcgatcttcttgcccccatgatcatccacggcattaagacacagggagcgaggcagaaattctcctccctctacatctcacagttcattattatgtatagtttggacggcaagaagtggcaaacttatagaggtaacagtactggaacactcatggtgttcttcggcaacgttgatagctctggcatcaaacacaacatctttaatcctcccataatagctcggtacatcagattgcatccgacccactacagcattaggagtacactccgaatggagcttatgggttgcgacttgaattcctgttcaatgccactcggaatggagtctaaagccatctctgatgcacagataaccgccagtagctactttacgaacatgtttgctacgtggtcaccctctaaggcaaggcttcatttgcaaggccggtctaatgcctggagacctcaggtgaacaacccgaaagaatggctccaggtggactttcagaagaccatgaaagtaacaggtgtcactactcagggagttaagtccttgctcaccagcatgtatgtgaaggagttccttatttcctcatcacaagatggccaccagtggaccctcttctttcagaatggtaaggtcaaagtgtttcagggcaatcaagacagcttcacacccgtggtgaacagtcttgatcctccactcttgacacgataccttcgaatccatccacagtcttgggttcaccagattgcattgcgcatggaagtacttggatgcgaggctcaggacctctac

SEQ ID NO: 2842 - protein, 1457 aa, synthetic construct
  REGION 1..1457: note = Variant of human B-domain deleted Factor VIII
MQIELSTCFFLCLLRFCFSATRRYYLGAVELSWDYMQSDLGELPVDARFPPRVPKSFPFNTSVVYKKTLFVEFTDHLFNIAKPRPPWMGLLGPTIQAEVYDTVVITLKNMASHPVSLHAVGVSYWKASEGAEYDDQTSQREKEDDKVFPGGSHTYVWQVLKENGPMASDPLCLTYSYLSHVDLVKDLNSGLIGALLVCREGSLAKEKTQTLHKFILLFAVFDEGKSWHSETKNSLMQDRDAASARAWPKMHTVNGYVNRSLPGLIGCHRKSVYWHVIGMGTTPEVHSIFLEGHTFLVRNHRQASLDISPITFLTAQTLLMDLGQFLLFCHISSHQHDGMEAYVKVDSCPEEPQLRMKNNEEAEDYDDDLTDSEMDVVRFDDDNSPSFIQIRSVAKKHPKTWVHYIAAEEEDWDYAPLVLAPDDRSYKSQYLNNGPQRIGRKYKKVRFMAYTDETFKTREAIQHESGILGPLLYGEVGDTLLIIFKNQASRPYNIYPHGITDVRPLYSRRLPKGVKHLKDFPILPGEIFKYKWTVTVEDGPTKSDPRCLTRYYSSFVNMERDLASGLIGPLLICYKESVDQRGNQIMSDKRNVILFSVFDENRSWYLTENIQRFLPNPAGVQLEDPEFQASNIMHSINGYVFDSLQLSVCLHEVAYWYILSIGAQTDFLSVFFSGYTFKHKMVYEDTLTLFPFSGETVFMSMENPGLWILGCHNSDFRNRGMTALLKVSSCDKNTGDYYEDSYEDISAYLLSKNNAIEPRSFSQNPPVLKRHQREITRTTLQSDQEEIDYDDTISVEMKKEDFDIYDEDENQSPRSFQKKTRHYFIAAVERLWDYGMSSSPHVLRNRAQSGSVPQFKKVVFQEFTDGSFTQPLYRGELNEHLGLLGPYIRAEVEDNIMVTFRNQASRPYSFYSSLISYEEDQRQGAEPRKNFVKPNETKTYFWKVQHHMAPTKDEFDCKAWAYFSDVDLEKDVHSGLIGPLLVCHTNTLNPAHGRQVTVQEFALFFTIFDETKSWYFTENMERNCRAPCNIQMEDPTFKENYRFHAINGYIMDTLPGLVMAQDQRIRWYLLSMGSNENIHSIHFSGHVFTVRKKEEYKMALYNLYPGVFETVEMLPSKAGIWRVECLIGEHLHAGMSTLFLVYSNKCQTPLGMASGHIRDFQITASGQYGQWAPKLARLHYSGSINAWSTKEPFSWIKVDLLAPMIIHGIKTQGARQKFSSLYISQFIIMYSLDGKKWQTYRGNSTGTLMVFFGNVDSSGIKHNIFNPPIIARYIRLHPTHYSIRSTLRMELMGCDLNSCSMPLGMESKAISDAQITASSYFTNMFATWSPSKARLHLQGRSNAWRPQVNNPKEWLQVDFQKTMKVTGVTTQGVKSLLTSMYVKEFLISSSQDGHQWTLFFQNGKVKVFQGNQDSFTPVVNSLDPPLLTRYLRIHPQSWVHQIALRMEVLGCEAQDLY

SEQ ID NO: 2843 - DNA, 4371 bp, synthetic construct
  misc_feature 1..4371: note = Variant of human B-domain deleted Factor VIII
  source 1..4371: mol_type = other DNA
atgcagattgaactgtctacctgcttcttcctctgtttgctgaggttctgctttagcgccactagacggtactaccttggcgctgtggagctgtcctgggactatatgcagagtgatttgggagagcttcccgtcgacgcacgatttcctcctcgcgttccaaagtcatttcccttcaacacaagcgtggtgtacaagaagacgctcttcgtcgaattcaccgatcacctgttcaatatcgccaaacccagaccaccatggatgggtcttttggggcctaccatacaagcggaggtgtatgacacagttgttatcactctcaagaacatggcttctcatccggtaagtcttcacgcagtgggcgtgtcctactggaaagcttcagaaggagccgagtatgatgatcagacatcccagagggagaaagaagacgacaaggtatttccaggtgggtctcatacctatgtgtggcaagtgctcaaagagaatggccctatggcaagcgatccgctctgtttgacttacagctacctttcacacgttgacctcgtcaaggacctcaactccgggttgattggagccttgttggtatgcagggaaggatctcttgccaaagagaagacacagaccctccacaagtttatccttctctttgctgtgttcgatgagggcaaaagttggcatagcgaaacgaagaattccctcatgcaggatcgcgacgcagccagcgccagagcttggcccaagatgcacactgtgaacggatatgtcaataggtcacttcctggcttgattgggtgtcatcggaaaagtgtctactggcacgtgatcggaatggggacaacaccagaggtccactccatatttctcgaaggccataccttccttgttcgaaaccacagacaggcatccttggagatctctcccattacctttctcactgcccaaacgctccttatggacttgggtcagttccttctcttctgccatatcagctcacaccagcatgatggtatggaagcttatgtgaaagtcgacagttgtcctgaggagccacagttgcgcatgaagaataatgaagaagccgaggattacgacgacgatctcaccgattctgagatggacgtggtgaggtttgatgacgacaactctccctccttcattcaaatccggagcgtggcgaagaaacaccccaagacttgggtccactatatagcggcggaagaggaggattgggattacgctcctcttgtattggcaccagatgaccgctcatacaaaagccagtacctcaacaacggaccgcagagaattggccggaagtataagaaagtgcgatttatggcctatacagacgaaacctttaagacaagggaggccatccagcatgagagtgggattttgggacctcttctttacggcgaagttggtgataccctcctcatcatcttcaagaatcaagcttctcgcccctataacatttacccacacgggatcactgacgttaggcctttgtatagcagaagacttcccaaaggcgtgaagcatctcaaagacttccccattttgccaggcgagatctttaagtacaaatggaccgtcacagtggaagatggaccgactaaatcagaccctcgatgccttacgcggtactattcctccttcgtgaatatggagagagatttggcaagcggactcataggaccactcctcatctgttacaaggaatctgtagaccagaggggtaaccagattatgagtgataaacgcaatgtgatcctttttagcgtcttcgacgagaaccggtcctggtacttgaccgagaatatacaaaggttccttcccaaccccgcaggcgttcagttggaagaccctgagtttcaggccagcaatattatgcactcaatcaacggctatgtgtttgatagtctccagctttctgtttgcctccatgaagtagcctattggtacatcttgtcaattggtgctcaaacagacttcctctccgtcttcttctccggctacacctttaagcacaagatggtgtatgaggacactctcacactctttccattttctggagaaaccgtgttcatgagcatggagaatccaggcctttggatcttgggttgccacaacagtgattttcgcaatcggggaatgactgctctcctcaaagtcagcagctgtgataagaacacaggcgactattacgaagattcttacgaggacataagtgcctacttgttgtccaagaataacgccattgagcccagatcattctcccagaatcctcccgtgcttaaaaggcatcagcgcgaaatcaccagaactactcttcagtctgatcaagaggagattgactatgacgacaccataagcgtggaaatgaagaaggaggatttcgatatctatgacgaagatgagaaccagtctccgcggagctttcagaagaagacgcgacactacttcattgcagcagtcgaaaggctttgggactacggtatgtcatcatcccctcatgtgttgcgcaatagagctcagagtggaagtgttccacagttcaagaaagtcgtctttcaagagtttacagatggcagcttcacacagcctctctatcggggcgagcttaacgaacatttgggactccttggtccctatatccgagccgaagtggaggacaacattatggttacctttaggaatcaagcctctcgcccctacagcttctactcctccctcatcagttatgaggaggatcagagacaaggcgctgaaccacggaagaactttgtgaaaccgaatgagacgaagacctacttctggaaagtacagcaccacatggcccccacaaaagacgaattcgattgcaaagcatgggcgtatttttcagacgttgacttggagaaagatgtacattcaggacttattggtcctttgttggtgtgtcacactaacactctcaatccagcccatggcaggcaggtgacagtccaggaattcgctcttttctttaccatctttgatgagaccaagtcctggtacttcacggaaaacatggagcgcaattgcagagccccctgtaacatacagatggaggaccctacctttaaggaaaattatcggttccacgcaatcaacggatacattatggatacactccctggccttgtgatggctcaggaccaacgaatcaggtggtacctcctcagcatgggttctaatgagaacatacactccattcacttttcaggacatgtgttcactgtccggaagaaagaagagtataagatggccctctacaatttgtatccaggcgtgtttgagaccgttgaaatgcttccctctaaagctggcatctggagagtagagtgcttgatcggagaacatcttcacgcaggtatgagcaccttgttcctcgtgtacagcaacaaatgtcagaccccacttggcatggccagtggacacattcgcgactttcagatcacagcatctggccagtatggacaatgggccccaaagttggctcgcctccattactccggtagcataaatgcgtggtccactaaagaacctttcagctggattaaggtcgatcttcttgcccccatgatcatccacggcattaagacacagggagcgaggcagaaattctcctccctctacatctcacagttcattattatgtatagtttggacggcaagaagtggcaaacttatagaggtaacagtactggaacagcgatggtgttcttcggcaacgttgatagctctggcatcaaacacaacatctttaatcctcccataatagctcggtacatcagattgcatccgacccactacagcattaggagtacactccgaatggagcttatgggttgcgacttgaattcctgttcaatgccactcggaatggagtctaaagccatctctgatgcacagataaccgccagtagctactttacgaacatgtttgctacgtggtcaccctctaaggcaaggcttcatttgcaaggccggtctaatgcctggagacctcaggtgaacaacccgaaagaatggctccaggtggactttcagaagaccatgaaagtaacaggtgtcactactcagggagttaagtccttgctcaccagcatgtatgtgaaggagttccttatttcctcatcacaagatggccaccagtggaccctcttctttcagaatggtaaggtcaaagtgtttcagggcaatcaagacagcttcacacccgtggtgaacagtcttgatcctccactcttgacacgataccttcgaatccatccacagtcttgggttcaccagattgcattgcgcatggaagtacttggatgcgaggctcaggacctctac

SEQ ID NO: 2844 - protein, 1457 aa, synthetic construct
  REGION 1..1457: note = Variant of human B-domain deleted Factor VIII
MQIELSTCFFLCLLRFCFSATRRYYLGAVELSWDYMQSDLGELPVDARFPPRVPKSFPFNTSVVYKKTLFVEFTDHLFNIAKPRPPWMGLLGPTIQAEVYDTVVITLKNMASHPVSLHAVGVSYWKASEGAEYDDQTSQREKEDDKVFPGGSHTYVWQVLKENGPMASDPLCLTYSYLSHVDLVKDLNSGLIGALLVCREGSLAKEKTQTLHKFILLFAVFDEGKSWHSETKNSLMQDRDAASARAWPKMHTVNGYVNRSLPGLIGCHRKSVYWHVIGMGTTPEVHSIFLEGHTFLVRNHRQASLEISPITFLTAQTLLMDLGQFLLFCHISSHQHDGMEAYVKVDSCPEEPQLRMKNNEEAEDYDDDLTDSEMDVVRFDDDNSPSFIQIRSVAKKHPKTWVHYIAAEEEDWDYAPLVLAPDDRSYKSQYLNNGPQRIGRKYKKVRFMAYTDETFKTREAIQHESGILGPLLYGEVGDTLLIIFKNQASRPYNIYPHGITDVRPLYSRRLPKGVKHLKDFPILPGEIFKYKWTVTVEDGPTKSDPRCLTRYYSSFVNMERDLASGLIGPLLICYKESVDQRGNQIMSDKRNVILFSVFDENRSWYLTENIQRFLPNPAGVQLEDPEFQASNIMHSINGYVFDSLQLSVCLHEVAYWYILSIGAQTDFLSVFFSGYTFKHKMVYEDTLTLFPFSGETVFMSMENPGLWILGCHNSDFRNRGMTALLKVSSCDKNTGDYYEDSYEDISAYLLSKNNAIEPRSFSQNPPVLKRHQREITRTTLQSDQEEIDYDDTISVEMKKEDFDIYDEDENQSPRSFQKKTRHYFIAAVERLWDYGMSSSPHVLRNRAQSGSVPQFKKVVFQEFTDGSFTQPLYRGELNEHLGLLGPYIRAEVEDNIMVTFRNQASRPYSFYSSLISYEEDQRQGAEPRKNFVKPNETKTYFWKVQHHMAPTKDEFDCKAWAYFSDVDLEKDVHSGLIGPLLVCHTNTLNPAHGRQVTVQEFALFFTIFDETKSWYFTENMERNCRAPCNIQMEDPTFKENYRFHAINGYIMDTLPGLVMAQDQRIRWYLLSMGSNENIHSIHFSGHVFTVRKKEEYKMALYNLYPGVFETVEMLPSKAGIWRVECLIGEHLHAGMSTLFLVYSNKCQTPLGMASGHIRDFQITASGQYGQWAPKLARLHYSGSINAWSTKEPFSWIKVDLLAPMIIHGIKTQGARQKFSSLYISQFIIMYSLDGKKWQTYRGNSTGTAMVFFGNVDSSGIKHNIFNPPIIARYIRLHPTHYSIRSTLRMELMGCDLNSCSMPLGMESKAISDAQITASSYFTNMFATWSPSKARLHLQGRSNAWRPQVNNPKEWLQVDFQKTMKVTGVTTQGVKSLLTSMYVKEFLISSSQDGHQWTLFFQNGKVKVFQGNQDSFTPVVNSLDPPLLTRYLRIHPQSWVHQIALRMEVLGCEAQDLY

SEQ ID NO: 2845 - DNA, 4371 bp, synthetic construct
  misc_feature 1..4371: note = Variant of human B-domain deleted Factor VIII
  source 1..4371: mol_type = other DNA
atgcagattgaactgtctacctgcttcttcctctgtttgctgaggttctgctttagcgccactagacggtactaccttggcgctgtggagctgtcctgggactatatgcagagtgatttgggagagcttcccgtcgacgcacgatttcctcctcgcgttccaaagtcatttcccttcaacacaagcgtggtgtacaagaagacgctcttcgtcgaattcaccgatcacctgttcaatatcgccaaacccagaccaccatggatgggtcttttggggcctaccatacaagcggaggtgtatgacacagttgttatcactctcaagaacatggcttctcatccggtaagtcttcacgcagtgggcgtgtcctactggaaagcttcagaaggagccgagtatgatgatcagacatcccagagggagaaagaagacgacaaggtatttccaggtgggtctcatacctatgtgtggcaagtgctcaaagagaatggccctatggcaagcgatccgctctgtttgacttacagctacctttcacacgttgacctcgtcaaggacctcaactccgggttgattggagccttgttggtatgcagggaaggatctcttgccaaagagaagacacagaccctccacaagtttatccttctctttgctgtgttcgatgagggcaaaagttggcatagcgaaacgaagaattccctcatgcaggatcgcgacgcagccagcgccagagcttggcccaagatgcacactgtgaacggatatgtcaataggtcacttcctggcttgattgggtgtcatcggaaaagtgtctactggcacgtgatcggaatggggacaacaccagaggtccactccatatttctcgaaggccataccttccttgttcgaaaccacagacaggcatccttggagatctctcccattacctttctcactgcccaaacgctccttatggacttgggtcagttccttctcttctgccatatcagctcacaccagcatgatggtatggaagcttatgtgaaagtcgacagttgtcctgaggagccacagttgcgcatgaagaataatgaagaagccgaggattacgacgacgatctcaccgattctgagatggacgtggtgaggtttgatgacgacaactctccctccttcattcaaatccggagcgtggcgaagaaacaccccaagacttgggtccactatatagcggcggaagaggaggattgggattacgctcctcttgtattggcaccagatgaccgctcatacaaaagccagtacctcaacaacggaccgcagagaattggccggaagtataagaaagtgcgatttatggcctatacagacgaaacctttaagacaagggaggccatccagcatgagagtgggattttgggacctcttctttacggcgaagttggtgataccctcctcatcatcttcaagaatcaagcttctcgcccctataacatttacccacacgggatcactgacgttaggcctttgtatagcagaagacttcccaaaggcgtgaagcatctcaaagacttccccattttgccaggcgagatctttaagtacaaatggaccgtcacagtggaagatggaccgactaaatcagaccctcgatgccttacgcggtactattcctccttcgtgaatatggagagagatttggcaagcggactcataggaccactcctcatctgttacaaggaatctgtagaccagaggggtaaccagattatgagtgataaacgcaatgtgatcctttttagcgtcttcgacgagaaccggtcctggtacttgaccgagaatatacaaaggttccttcccaaccccgcaggcgttcagttggaagaccctgagtttcaggccagcaatattatgcactcaatcaacggctatgtgtttgatagtctccagctttctgtttgcctccatgaagtagcctattggtacatcttgtcaattggtgctcaaacagacttcctctccgtcttcttctccggctacacctttaagcacaagatggtgtatgaggacactctcacactctttccattttctggagaaaccgtgttcatgagcatggagaatccaggcctttggatcttgggttgccacaacagtgattttcgcaatcggggaatgactgctctcctcaaagtcagcagctgtgataagaacacaggcgactattacgaagattcttacgaggacataagtgcctacttgttgtccaagaataacgccattgagcccagatcattctcccagaatcctcccgtgcttaaaaggcatcagcgcgaaatcaccagaactactcttcagtctgatcaagaggagattgactatgacgacaccataagcgtggaaatgaagaaggaggatttcgatatctatgacgaagatgagaaccagtctccgcggagctttcagaagaagacgcgacactacttcattgcagcagtcgaaaggctttgggactacggtatgtcatcatcccctcatgtgttgcgcaatagagctcagagtggaagtgttccacagttcaagaaagtcgtctttcaagagtttacagatggcagcttcacacagcctctctatcggggcgagcttaacgaacatttgggactccttggtccctatatccgagccgaagtggaggacaacattatggttacctttaggaatcaagcctctcgcccctacagcttctactcctccctcatcagttatgaggaggatcagagacaaggcgctgaaccacggaagaactttgtgaaaccgaatgagacgaagacctacttctggaaagtacagcaccacatggcccccacaaaagacgaattcgattgcaaagcatgggcgtatttttcagacgttgacttggagaaagatgtacattcaggacttattggtcctttgttggtgtgtcacactaacactctcaatccagcccatggcaggcaggtgacagtccaggaattcgctcttttctttaccatctttgatgagaccaagtcctggtacttcacggaaaacatggagcgcaattgcagagccccctgtaacatacagatggaggaccctacctttaaggaaaattatcggttccacgcaatcaacggatacattatggatacactccctggccttgtgatggctcaggaccaacgaatcaggtggtacctcctcagcatgggttctaatgagaacatacactccattcacttttcaggacatgtgttcactgtccggaagaaagaagagtataagatggccctctacaatttgtatccaggcgtgtttgagaccgttgaaatgcttccctctaaagctggcatctggagagtagagtgcttgatcggagaacatcttcacgcaggtatgagcaccttgttcctcgtgtacagcaacaaatgtcagaccccacttggcatggccagtggacacattcgcgactttcagatcacagcatctggccagtatggacaatgggccccaaagttggctcgcctccattactccggtagcataaatgcgtggtccactaaagaacctttcagctggattaaggtcgatcttcttgcccccatgatcatccacggcattaagacacagggagcgaggcagaaattctcctccctctacatctcacagttcattattatgtatagtttggacggcaagaagtggcaaacttatagaggtaacagtactggaacactcatggtgttcttcggcaacgttgatagctctggcatcaaacacaacatctttaatcctcccataatagctcggtacatcagattgcatccgacccactacagcattaggagtacactccgaatggagcttatgggttgcgacttgaattcctgttcaatgccactcggaatggagtctaaagccatctctgatgcacagataaccgccagtagctactttacgaacatgtttgctacgtggtcaccctctaaggcaaggcttcatttgcaaggccggtctaatgcctggagacctcaggtgaacaacccgaaagaatggctccaggtggactttcagaagaccatgaaagtaacaggtgtcactactcagggagttaagtccttgctcaccagcatgtatgtgaaggagttccttatttcctcatcacaagatggccaccagtggaccctcttctttcagaatggtaaggtcaaagtgtttcagggcaatcaagacgagttcacacccgtggtgaacagtcttgatcctccactcttgacacgataccttcgaatccatccacagtcttgggttcaccagattgcattgcgcatggaagtacttggatgcgaggctcaggacctctac

SEQ ID NO: 2846 - protein, 1457 aa, synthetic construct
  REGION 1..1457: note = Variant of human B-domain deleted Factor VIII
MQIELSTCFFLCLLRFCFSATRRYYLGAVELSWDYMQSDLGELPVDARFPPRVPKSFPFNTSVVYKKTLFVEFTDHLFNIAKPRPPWMGLLGPTIQAEVYDTVVITLKNMASHPVSLHAVGVSYWKASEGAEYDDQTSQREKEDDKVFPGGSHTYVWQVLKENGPMASDPLCLTYSYLSHVDLVKDLNSGLIGALLVCREGSLAKEKTQTLHKFILLFAVFDEGKSWHSETKNSLMQDRDAASARAWPKMHTVNGYVNRSLPGLIGCHRKSVYWHVIGMGTTPEVHSIFLEGHTFLVRNHRQASLEISPITFLTAQTLLMDLGQFLLFCHISSHQHDGMEAYVKVDSCPEEPQLRMKNNEEAEDYDDDLTDSEMDVVRFDDDNSPSFIQIRSVAKKHPKTWVHYIAAEEEDWDYAPLVLAPDDRSYKSQYLNNGPQRIGRKYKKVRFMAYTDETFKTREAIQHESGILGPLLYGEVGDTLLIIFKNQASRPYNIYPHGITDVRPLYSRRLPKGVKHLKDFPILPGEIFKYKWTVTVEDGPTKSDPRCLTRYYSSFVNMERDLASGLIGPLLICYKESVDQRGNQIMSDKRNVILFSVFDENRSWYLTENIQRFLPNPAGVQLEDPEFQASNIMHSINGYVFDSLQLSVCLHEVAYWYILSIGAQTDFLSVFFSGYTFKHKMVYEDTLTLFPFSGETVFMSMENPGLWILGCHNSDFRNRGMTALLKVSSCDKNTGDYYEDSYEDISAYLLSKNNAIEPRSFSQNPPVLKRHQREITRTTLQSDQEEIDYDDTISVEMKKEDFDIYDEDENQSPRSFQKKTRHYFIAAVERLWDYGMSSSPHVLRNRAQSGSVPQFKKVVFQEFTDGSFTQPLYRGELNEHLGLLGPYIRAEVEDNIMVTFRNQASRPYSFYSSLISYEEDQRQGAEPRKNFVKPNETKTYFWKVQHHMAPTKDEFDCKAWAYFSDVDLEKDVHSGLIGPLLVCHTNTLNPAHGRQVTVQEFALFFTIFDETKSWYFTENMERNCRAPCNIQMEDPTFKENYRFHAINGYIMDTLPGLVMAQDQRIRWYLLSMGSNENIHSIHFSGHVFTVRKKEEYKMALYNLYPGVFETVEMLPSKAGIWRVECLIGEHLHAGMSTLFLVYSNKCQTPLGMASGHIRDFQITASGQYGQWAPKLARLHYSGSINAWSTKEPFSWIKVDLLAPMIIHGIKTQGARQKFSSLYISQFIIMYSLDGKKWQTYRGNSTGTLMVFFGNVDSSGIKHNIFNPPIIARYIRLHPTHYSIRSTLRMELMGCDLNSCSMPLGMESKAISDAQITASSYFTNMFATWSPSKARLHLQGRSNAWRPQVNNPKEWLQVDFQKTMKVTGVTTQGVKSLLTSMYVKEFLISSSQDGHQWTLFFQNGKVKVFQGNQDEFTPVVNSLDPPLLTRYLRIHPQSWVHQIALRMEVLGCEAQDLY

SEQ ID NO: 2847 - DNA, 4371 bp, synthetic construct
  misc_feature 1..4371: note = Variant of human B-domain deleted Factor VIII
  source 1..4371: mol_type = other DNA
atgcagattgaactgtctacctgcttcttcctctgtttgctgaggttctgctttagcgccactagacggtactaccttggcgctgtggagctgtcctgggactatatgcagagtgatttgggagagcttcccgtcgacgcacgatttcctcctcgcgttccaaagtcatttcccttcaacacaagcgtggtgtacaagaagacgctcttcgtcgaattcaccgatcacctgttcaatatcgccaaacccagaccaccatggatgggtcttttggggcctaccatacaagcggaggtgtatgacacagttgttatcactctcaagaacatggcttctcatccggtaagtcttcacgcagtgggcgtgtcctactggaaagcttcagaaggagccgagtatgatgatcagacatcccagagggagaaagaagacgacaaggtatttccaggtgggtctcatacctatgtgtggcaagtgctcaaagagaatggccctatggcaagcgatccgctctgtttgacttacagctacctttcacacgttgacctcgtcaaggacctcaactccgggttgattggagccttgttggtatgcagggaaggatctcttgccaaagagaagacacagaccctccacaagtttatccttctctttgctgtgttcgatgagggcaaaagttggcatagcgaaacgaagaattccctcatgcaggatcgcgacgcagccagcgccagagcttggcccaagatgcacactgtgaacggatatgtcaataggtcacttcctggcttgattgggtgtcatcggaaaagtgtctactggcacgtgatcggaatggggacaacaccagaggtccactccatatttctcgaaggccataccttccttgttcgaaaccacagacaggcatccttggagatctctcccattacctttctcactgcccaaacgctccttatggacttgggtcagttccttctcttctgccatatcagctcacaccagcatgatggtatggaagcttatgtgaaagtcgacagttgtcctgaggagccacagttgcgcatgaagaataatgaagaagccgaggattacgacgacgatctcaccgattctgagatggacgtggtgaggtttgatgacgacaactctccctccttcattcaaatccggagcgtggcgaagaaacaccccaagacttgggtccactatatagcggcggaagaggaggattgggattacgctcctcttgtattggcaccagatgaccgctcatacaaaagccagtacctcaacaacggaccgcagagaattggccggaagtataagaaagtgcgatttatggcctatacagacgaaacctttaagacaagggaggccatccagcatgagagtgggattttgggacctcttctttacggcgaagttggtgataccctcctcatcatcttcaagaatcaagcttctcgcccctataacatttacccacacgggatcactgacgttaggcctttgtatagcagaagacttcccaaaggcgtgaagcatctcaaagacttccccattttgccaggcgagatctttaagtacaaatggaccgtcacagtggaagatggaccgactaaatcagaccctcgatgccttacgcggtactattcctccttcgtgaatatggagagagatttggcaagcggactcataggaccactcctcatctgttacaaggaatctgtagaccagaggggtaaccagattatgagtgataaacgcaatgtgatcctttttagcgtcttcgacgagaaccggtcctggtacttgaccgagaatatacaaaggttccttcccaaccccgcaggcgttcagttggaagaccctgagtttcaggccagcaatattatgcactcaatcaacggctatgtgtttgatagtctccagctttctgtttgcctccatgaagtagcctattggtacatcttgtcaattggtgctcaaacagacttcctctccgtcttcttctccggctacacctttaagcacaagatggtgtatgaggacactctcacactctttccattttctggagaaaccgtgttcatgagcatggagaatccaggcctttggatcttgggttgccacaacagtgattttcgcaatcggggaatgactgctctcctcaaagtcagcagctgtgataagaacacaggcgactattacgaagattcttacgaggacataagtgcctacttgttgtccaagaataacgccattgagcccagatcattctcccagaatcctcccgtgcttaaaaggcatcagcgcgaaatcaccagaactactcttcagtctgatcaagaggagattgactatgacgacaccataagcgtggaaatgaagaaggaggatttcgatatctatgacgaagatgagaaccagtctccgcggagctttcagaagaagacgcgacactacttcattgcagcagtcgaaaggctttgggactacggtatgtcatcatcccctcatgtgttgcgcaatagagctcagagtggaagtgttccacagttcaagaaagtcgtctttcaagagtttacagatggcagcttcacacagcctctctatcggggcgagcttaacgaacatttgggactccttggtccctatatccgagccgaagtggaggacaacattatggttacctttaggaatcaagcctctcgcccctacagcttctactcctccctcatcagttatgaggaggatcagagacaaggcgctgaaccacggaagaactttgtgaaaccgaatgagacgaagacctacttctggaaagtacagcaccacatggcccccacaaaagacgaattcgattgcaaagcatgggcgtatttttcagacgttgacttggagaaagatgtacattcaggacttattggtcctttgttggtgtgtcacactaacactctcaatccagcccatggcaggcaggtgacagtccaggaattcgctcttttctttaccatctttgatgagaccaagtcctggtacttcacggaaaacatggagcgcaattgcagagccccctgtaacatacagatggaggaccctacctttaaggaaaattatcggttccacgcaatcaacggatacattatggatacactccctggccttgtgatggctcaggaccaacgaatcaggtggtacctcctcagcatgggttctaatgagaacatacactccattcacttttcaggacatgtgttcactgtccggaagaaagaagagtataagatggccctctacaatttgtatccaggcgtgtttgagaccgttgaaatgcttccctctaaagctggcatctggagagtagagtgcttgatcggagaacatcttcacgcaggtatgagcaccttgttcctcgtgtacagcaacaaatgtcagaccccacttggcatggccagtggacacattcgcgactttcagatcacagcatctggccagtatggacaatgggccccaaagttggctcgcctccattactccggtagcataaatgcgtggtccactaaagaacctttcagctggattaaggtcgatcttcttgcccccatgatcatccacggcattaagacacagggagcgaggcagaaattctcctccctctacatctcacagttcattattatgtatagtttggacggcaagaagtggcaaacttatagaggtaacagtactggaacactcatggtgttcttcggcaacgttgatagctctggcatcaaacacaacatctttaatcctcccataatagctcggtacatcagattgcatccgacccactacagcattaggagtacactccgaatggagcttatgggttgcgacttgaattcctgttcaatgccactcggaatggagtctaaagccatctctgatgcacagataaccgccagtagctactttacgaacatgtttgctacgtggtcaccctctaaggcaaggcttcatttgcaaggccggtctaatgcctggagacctcaggtgaacaacccgaaagaatggctccaggtggactttcagaagaccatgaaagtaacaggtgtcactactcagggagttaagtccttgctcaccagcatgtatgtgaaggagttccttatttcctcatcacaagatggccaccagtggaccctcttctttcagaatggtaaggtcaaagtgtttcagggcaatcaagacgatttcacacccgtggtgaacagtcttgatcctccactcttgacacgataccttcgaatccatccacagtcttgggttcaccagattgcattgcgcatggaagtacttggatgcgaggctcaggacctctac

SEQ ID NO: 2848 - protein, 1457 aa, synthetic construct
  REGION 1..1457: note = Variant of human B-domain deleted Factor VIII
MQIELSTCFFLCLLRFCFSATRRYYLGAVELSWDYMQSDLGELPVDARFPPRVPKSFPFNTSVVYKKTLFVEFTDHLFNIAKPRPPWMGLLGPTIQAEVYDTVVITLKNMASHPVSLHAVGVSYWKASEGAEYDDQTSQREKEDDKVFPGGSHTYVWQVLKENGPMASDPLCLTYSYLSHVDLVKDLNSGLIGALLVCREGSLAKEKTQTLHKFILLFAVFDEGKSWHSETKNSLMQDRDAASARAWPKMHTVNGYVNRSLPGLIGCHRKSVYWHVIGMGTTPEVHSIFLEGHTFLVRNHRQASLEISPITFLTAQTLLMDLGQFLLFCHISSHQHDGMEAYVKVDSCPEEPQLRMKNNEEAEDYDDDLTDSEMDVVRFDDDNSPSFIQIRSVAKKHPKTWVHYIAAEEEDWDYAPLVLAPDDRSYKSQYLNNGPQRIGRKYKKVRFMAYTDETFKTREAIQHESGILGPLLYGEVGDTLLIIFKNQASRPYNIYPHGITDVRPLYSRRLPKGVKHLKDFPILPGEIFKYKWTVTVEDGPTKSDPRCLTRYYSSFVNMERDLASGLIGPLLICYKESVDQRGNQIMSDKRNVILFSVFDENRSWYLTENIQRFLPNPAGVQLEDPEFQASNIMHSINGYVFDSLQLSVCLHEVAYWYILSIGAQTDFLSVFFSGYTFKHKMVYEDTLTLFPFSGETVFMSMENPGLWILGCHNSDFRNRGMTALLKVSSCDKNTGDYYEDSYEDISAYLLSKNNAIEPRSFSQNPPVLKRHQREITRTTLQSDQEEIDYDDTISVEMKKEDFDIYDEDENQSPRSFQKKTRHYFIAAVERLWDYGMSSSPHVLRNRAQSGSVPQFKKVVFQEFTDGSFTQPLYRGELNEHLGLLGPYIRAEVEDNIMVTFRNQASRPYSFYSSLISYEEDQRQGAEPRKNFVKPNETKTYFWKVQHHMAPTKDEFDCKAWAYFSDVDLEKDVHSGLIGPLLVCHTNTLNPAHGRQVTVQEFALFFTIFDETKSWYFTENMERNCRAPCNIQMEDPTFKENYRFHAINGYIMDTLPGLVMAQDQRIRWYLLSMGSNENIHSIHFSGHVFTVRKKEEYKMALYNLYPGVFETVEMLPSKAGIWRVECLIGEHLHAGMSTLFLVYSNKCQTPLGMASGHIRDFQITASGQYGQWAPKLARLHYSGSINAWSTKEPFSWIKVDLLAPMIIHGIKTQGARQKFSSLYISQFIIMYSLDGKKWQTYRGNSTGTLMVFFGNVDSSGIKHNIFNPPIIARYIRLHPTHYSIRSTLRMELMGCDLNSCSMPLGMESKAISDAQITASSYFTNMFATWSPSKARLHLQGRSNAWRPQVNNPKEWLQVDFQKTMKVTGVTTQGVKSLLTSMYVKEFLISSSQDGHQWTLFFQNGKVKVFQGNQDDFTPVVNSLDPPLLTRYLRIHPQSWVHQIALRMEVLGCEAQDLY

SEQ ID NO: 2849 - DNA, 4371 bp, synthetic construct
  misc_feature 1..4371: note = Variant of human B-domain deleted Factor VIII
  source 1..4371: mol_type = other DNA
atgcagattgaactgtctacctgcttcttcctctgtttgctgaggttctgctttagcgccactagacggtactaccttggcgctgtggagctgtcctgggactatatgcagagtgatttgggagagcttcccgtcgacgcacgatttcctcctcgcgttccaaagtcatttcccttcaacacaagcgtggtgtacaagaagacgctcttcgtcgaattcaccgatcacctgttcaatatcgccaaacccagaccaccatggatgggtcttttggggcctaccatacaagcggaggtgtatgacacagttgttatcactctcaagaacatggcttctcatccggtaagtcttcacgcagtgggcgtgtcctactggaaagcttcagaaggagccgagtatgatgatcagacatcccagagggagaaagaagacgacaaggtatttccaggtgggtctcatacctatgtgtggcaagtgctcaaagagaatggccctatggcaagcgatccgctctgtttgacttacagctacctttcacacgttgacctcgtcaaggacctcaactccgggttgattggagccttgttggtatgcagggaaggatctcttgccaaagagaagacacagaccctccacaagtttatccttctctttgctgtgttcgatgagggcaaaagttggcatagcgaaacgaagaattccctcatgcaggatcgcgacgcagccagcgccagagcttggcccaagatgcacactgtgaacggatatgtcaataggtcacttcctggcttgattgggtgtcatcggaaaagtgtctactggcacgtgatcggaatggggacaacaccagaggtccactccatatttctcgaaggccataccttccttgttcgaaaccacagacaggcatccttggagatctctcccattacctttctcactgcccaaacgctccttatggacttgggtcagttccttctcttctgccatatcagctcacaccagcatgatggtatggaagcttatgtgaaagtcgacagttgtcctgaggagccacagttgcgcatgaagaataatgaagaagccgaggattacgacgacgatctcaccgattctgagatggacgtggtgaggtttgatgacgacaactctccctccttcattcaaatccggagcgtggcgaagaaacaccccaagacttgggtccactatatagcggcggaagaggaggattgggattacgctcctcttgtattggcaccagatgaccgctcatacaaaagccagtacctcaacaacggaccgcagagaattggccggaagtataagaaagtgcgatttatggcctatacagacgaaacctttaagacaagggaggccatccagcatgagagtgggattttgggacctcttctttacggcgaagttggtgataccctcctcatcatcttcaagaatcaagcttctcgcccctataacatttacccacacgggatcactgacgttaggcctttgtatagcagaagacttcccaaaggcgtgaagcatctcaaagacttccccattttgccaggcgagatctttaagtacaaatggaccgtcacagtggaagatggaccgactaaatcagaccctcgatgccttacgcggtactattcctccttcgtgaatatggagagagatttggcaagcggactcataggaccactcctcatctgttacaaggaatctgtagaccagaggggtaaccagattatgagtgataaacgcaatgtgatcctttttagcgtcttcgacgagaaccggtcctggtacttgaccgagaatatacaaaggttccttcccaaccccgcaggcgttcagttggaagaccctgagtttcaggccagcaatattatgcactcaatcaacggctatgtgtttgatagtctccagctttctgtttgcctccatgaagtagcctattggtacatcttgtcaattggtgctcaaacagacttcctctccgtcttcttctccggctacacctttaagcacaagatggtgtatgaggacactctcacactctttccattttctggagaaaccgtgttcatgagcatggagaatccaggcctttggatcttgggttgccacaacagtgattttcgcaatcggggaatgactgctctcctcaaagtcagcagctgtgataagaacacaggcgactattacgaagattcttacgaggacataagtgcctacttgttgtccaagaataacgccattgagcccagatcattctcccagaatcctcccgtgcttaaaaggcatcagcgcgaaatcaccagaactactcttcagtctgatcaagaggagattgactatgacgacaccataagcgtggaaatgaagaaggaggatttcgatatctatgacgaagatgagaaccagtctccgcggagctttcagaagaagacgcgacactacttcattgcagcagtcgaaaggctttgggactacggtatgtcatcatcccctcatgtgttgcgcaatagagctcagagtggaagtgttccacagttcaagaaagtcgtctttcaagagtttacagatggcagcttcacacagcctctctatcggggcgagcttaacgaacatttgggactccttggtccctatatccgagccgaagtggaggacaacattatggttacctttaggaatcaagcctctcgcccctacagcttctactcctccctcatcagttatgaggaggatcagagacaaggcgctgaaccacggaagaactttgtgaaaccgaatgagacgaagacctacttctggaaagtacagcaccacatggcccccacaaaagacgaattcgattgcaaagcatgggcgtatttttcagacgttgacttggagaaagatgtacattcaggacttattggtcctttgttggtgtgtcacactaacactctcaatccagcccatggcaggcaggtgacagtccaggaattcgctcttttctttaccatctttgatgagaccaagtcctggtacttcacggaaaacatggagcgcaattgcagagccccctgtaacatacagatggaggaccctacctttaaggaaaattatcggttccacgcaatcaacggatacattatggatacactccctggccttgtgatggctcaggaccaacgaatcaggtggtacctcctcagcatgggttctaatgagaacatacactccattcacttttcaggacatgtgttcactgtccggaagaaagaagagtataagatggccctctacaatttgtatccaggcgtgtttgagaccgttgaaatgcttccctctaaagctggcatctggagagtagagtgcttgatcggagaacatcttcacgcaggtatgagcaccttgttcctcgtgtacagcaacaaatgtcagaccccacttggcatggccagtggacacattcgcgactttcagatcacagcatctggccagtatggacaatgggccccaaagttggctcgcctccattactccggtagcataaatgcgtggtccactaaagaacctttcagctggattaaggtcgatcttcttgcccccatgatcatccacggcattaagacacagggagcgaggcagaaattctcctccctctacatctcacagttcattattatgtatagtttggacggcaagaagtggcaaacttatagaggtaacagtactggaacaaagatggtgttcttcggcaacgttgatagctctggcatcaaacacaacatctttaatcctcccataatagctcggtacatcagattgcatccgacccactacagcattaggagtacactccgaatggagcttatgggttgcgacttgaattcctgttcaatgccactcggaatggagtctaaagccatctctgatgcacagataaccgccagtagctactttacgaacatgtttgctacgtggtcaccctctaaggcaaggcttcatttgcaaggccggtctaatgcctggagacctcaggtgaacaacccgaaagaatggctccaggtggactttcagaagaccatgaaagtaacaggtgtcactactcagggagttaagtccttgctcaccagcatgtatgtgaaggagttccttatttcctcatcacaagatggccaccagtggaccctcttctttcagaatggtaaggtcaaagtgtttcagggcaatcaagacagcttcacacccgtggtgaacagtcttgatcctccactcttgacacgataccttcgaatccatccacagtcttgggttcaccagattgcattgcgcatggaagtacttggatgcgaggctcaggacctctac

SEQ ID NO: 2850 - protein, 1457 aa, synthetic construct
  REGION 1..1457: note = Variant of human B-domain deleted Factor VIII
MQIELSTCFFLCLLRFCFSATRRYYLGAVELSWDYMQSDLGELPVDARFPPRVPKSFPFNTSVVYKKTLFVEFTDHLFNIAKPRPPWMGLLGPTIQAEVYDTVVITLKNMASHPVSLHAVGVSYWKASEGAEYDDQTSQREKEDDKVFPGGSHTYVWQVLKENGPMASDPLCLTYSYLSHVDLVKDLNSGLIGALLVCREGSLAKEKTQTLHKFILLFAVFDEGKSWHSETKNSLMQDRDAASARAWPKMHTVNGYVNRSLPGLIGCHRKSVYWHVIGMGTTPEVHSIFLEGHTFLVRNHRQASLEISPITFLTAQTLLMDLGQFLLFCHISSHQHDGMEAYVKVDSCPEEPQLRMKNNEEAEDYDDDLTDSEMDVVRFDDDNSPSFIQIRSVAKKHPKTWVHYIAAEEEDWDYAPLVLAPDDRSYKSQYLNNGPQRIGRKYKKVRFMAYTDETFKTREAIQHESGILGPLLYGEVGDTLLIIFKNQASRPYNIYPHGITDVRPLYSRRLPKGVKHLKDFPILPGEIFKYKWTVTVEDGPTKSDPRCLTRYYSSFVNMERDLASGLIGPLLICYKESVDQRGNQIMSDKRNVILFSVFDENRSWYLTENIQRFLPNPAGVQLEDPEFQASNIMHSINGYVFDSLQLSVCLHEVAYWYILSIGAQTDFLSVFFSGYTFKHKMVYEDTLTLFPFSGETVFMSMENPGLWILGCHNSDFRNRGMTALLKVSSCDKNTGDYYEDSYEDISAYLLSKNNAIEPRSFSQNPPVLKRHQREITRTTLQSDQEEIDYDDTISVEMKKEDFDIYDEDENQSPRSFQKKTRHYFIAAVERLWDYGMSSSPHVLRNRAQSGSVPQFKKVVFQEFTDGSFTQPLYRGELNEHLGLLGPYIRAEVEDNIMVTFRNQASRPYSFYSSLISYEEDQRQGAEPRKNFVKPNETKTYFWKVQHHMAPTKDEFDCKAWAYFSDVDLEKDVHSGLIGPLLVCHTNTLNPAHGRQVTVQEFALFFTIFDETKSWYFTENMERNCRAPCNIQMEDPTFKENYRFHAINGYIMDTLPGLVMAQDQRIRWYLLSMGSNENIHSIHFSGHVFTVRKKEEYKMALYNLYPGVFETVEMLPSKAGIWRVECLIGEHLHAGMSTLFLVYSNKCQTPLGMASGHIRDFQITASGQYGQWAPKLARLHYSGSINAWSTKEPFSWIKVDLLAPMIIHGIKTQGARQKFSSLYISQFIIMYSLDGKKWQTYRGNSTGTKMVFFGNVDSSGIKHNIFNPPIIARYIRLHPTHYSIRSTLRMELMGCDLNSCSMPLGMESKAISDAQITASSYFTNMFATWSPSKARLHLQGRSNAWRPQVNNPKEWLQVDFQKTMKVTGVTTQGVKSLLTSMYVKEFLISSSQDGHQWTLFFQNGKVKVFQGNQDSFTPVVNSLDPPLLTRYLRIHPQSWVHQIALRMEVLGCEAQDLY

SEQ ID NO: 2851 - DNA, 4371 bp, synthetic construct
  misc_feature 1..4371: note = Variant of human B-domain deleted Factor VIII
  source 1..4371: mol_type = other DNA
atgcagattgaactgtctacctgcttcttcctctgtttgctgaggttctgctttagcgccactagacggtactaccttggcgctgtggagctgtcctgggactatatgcagagtgatttgggagagcttcccgtcgacgcacgatttcctcctcgcgttccaaagtcatttcccttcaacacaagcgtggtgtacaagaagacgctcttcgtcgaattcaccgatcacctgttcaatatcgccaaacccagaccaccatggatgggtcttttggggcctaccatacaagcggaggtgtatgacacagttgttatcactctcaagaacatggcttctcatccggtaagtcttcacgcagtgggcgtgtcctactggaaagcttcagaaggagccgagtatgatgatcagacatcccagagggagaaagaagacgacaaggtatttccaggtgggtctcatacctatgtgtggcaagtgctcaaagagaatggccctatggcaagcgatccgctctgtttgacttacagctacctttcacacgttgacctcgtcaaggacctcaactccgggttgattggagccttgttggtatgcagggaaggatctcttgccaaagagaagacacagaccctccacaagtttatccttctctttgctgtgttcgatgagggcaaaagttggcatagcgaaacgaagaattccctcatgcaggatcgcgacgcagccagcgccagagcttggcccaagatgcacactgtgaacggatatgtcaataggtcacttcctggcttgattgggtgtcatcggaaaagtgtctactggcacgtgatcggaatggggacaacaccagaggtccactccatatttctcgaaggccataccttccttgttcgaaaccacagacaggcatccttggagatctctcccattacctttctcactgcccaaacgctccttatggacttgggtcagttccttctcttctgccatatcagctcacaccagcatgatggtatggaagcttatgtgaaagtcgacagttgtcctgaggagccacagttgcgcatgaagaataatgaagaagccgaggattacgacgacgatctcaccgattctgagatggacgtggtgaggtttgatgacgacaactctccctccttcattcaatctcggagcgtggcgaagaaacaccccaagacttgggtccactatatagcggcggaagaggaggattgggattacgctcctcttgtattggcaccagatgaccgctcatacaaaagccagtacctcaacaacggaccgcagagaattggccggaagtataagaaagtgcgatttatggcctatacagacgaaacctttaagacaagggaggccatccagcatgagagtgggattttgggacctcttctttacggcgaagttggtgataccctcctcatcatcttcaagaatcaagcttctcgcccctataacatttacccacacgggatcactgacgttaggcctttgtatagcagaagacttcccaaaggcgtgaagcatctcaaagacttccccattttgccaggcgagatctttaagtacaaatggaccgtcacagtggaagatggaccgactaaatcagaccctcgatgccttacgcggtactattcctccttcgtgaatatggagagagatttggcaagcggactcataggaccactcctcatctgttacaaggaatctgtagaccagaggggtaaccagattatgagtgataaacgcaatgtgatcctttttagcgtcttcgacgagaaccggtcctggtacttgaccgagaatatacaaaggttccttcccaaccccgcaggcgttcagttggaagaccctgagtttcaggccagcaatattatgcactcaatcaacggctatgtgtttgatagtctccagctttctgtttgcctccatgaagtagcctattggtacatcttgtcaattggtgctcaaacagacttcctctccgtcttcttctccggctacacctttaagcacaagatggtgtatgaggacactctcacactctttccattttctggagaaaccgtgttcatgagcatggagaatccaggcctttggatcttgggttgccacaacagtgattttcgcaatcggggaatgactgctctcctcaaagtcagcagctgtgataagaacacaggcgactattacgaagattcttacgaggacataagtgcctacttgttgtccaagaataacgccattgagcccagatcattctcccagaatcctcccgtgcttaaaaggcatcagcgcgaaatcaccagaactactcttcagtctgatcaagaggagattgactatgacgacaccataagcgtggaaatgaagaaggaggatttcgatatctatgacgaagatgagaaccagtctccgcggagctttcagaagaagacgcgacactacttcattgcagcagtcgaaaggctttgggactacggtatgtcatcatcccctcatgtgttgcgcaatagagctcagagtggaagtgttccacagttcaagaaagtcgtctttcaagagtttacagatggcagcttcacacagcctctctatcggggcgagcttaacgaacatttgggactccttggtccctatatccgagccgaagtggaggacaacattatggttacctttaggaatcaagcctctcgcccctacagcttctactcctccctcatcagttatgaggaggatcagagacaaggcgctgaaccacggaagaactttgtgaaaccgaatgagacgaagacctacttctggaaagtacagcaccacatggcccccacaaaagacgaattcgattgcaaagcatgggcgtatttttcagacgttgacttggagaaagatgtacattcaggacttattggtcctttgttggtgtgtcacactaacactctcaatccagcccatggcaggcaggtgacagtccaggaattcgctcttttctttaccatctttgatgagaccaagtcctggtacttcacggaaaacatggagcgcaattgcagagccccctgtaacatacagatggaggaccctacctttaaggaaaattatcggttccacgcaatcaacggatacattatggatacactccctggccttgtgatggctcaggaccaacgaatcaggtggtacctcctcagcatgggttctaatgagaacatacactccattcacttttcaggacatgtgttcactgtccggaagaaagaagagtataagatggccctctacaatttgtatccaggcgtgtttgagaccgttgaaatgcttccctctaaagctggcatctggagagtagagtgcttgatcggagaacatcttcacgcaggtatgagcaccttgttcctcgtgtacagcaacaaatgtcagaccccacttggcatggccagtggacacattcgcgactttcagatcacagcatctggccagtatggacaatgggccccaaagttggctcgcctccattactccggtagcataaatgcgtggtccactaaagaacctttcagctggattaaggtcgatcttcttgcccccatgatcatccacggcattaagacacagggagcgaggcagaaattctcctccctctacatctcacagttcattattatgtatagtttggacggcaagaagtggcaaacttatagaggtaacagtactggaacactcatggtgttcttcggcaacgttgatagctctggcatcaaacacaacatctttaatcctccaataatagctcggtacatcagattgcatccgacccactacagcattaggagtacactccgaatggagcttatgggttgcgacttgaattcctgttcaatgccactcggaatggagtctaaagccatctctgatgcacagataaccgccagtagctactttacgaacatgtttgctacgtggtcaccctctaaggcaaggcttcatttgcaaggccggtctaatgcctggagacctcaggtgaacaacccgaaagaatggctccaggtggactttcagaagaccatgaaagtaacaggtgtcactactcagggagttaagtccttgctcaccagcatgtatgtgaaggagttccttatttcctcatcacaagatggccaccagtggaccctcttctttcagaatggtaaggtcaaagtgtttcagggcaatcaagacagcttcacacccgtggtgaacagtcttgatcctccactcttgacacgataccttcgaatccatccacagtcttgggttcaccagattgcattgcgcatggaagtacttggatgcgaggctcaggacctctac

SEQ ID NO: 2852 - protein, 1457 aa, synthetic construct
  REGION 1..1457: note = Variant of human B-domain deleted Factor VIII
MQIELSTCFFLCLLRFCFSATRRYYLGAVELSWDYMQSDLGELPVDARFPPRVPKSFPFNTSVVYKKTLFVEFTDHLFNIAKPRPPWMGLLGPTIQAEVYDTVVITLKNMASHPVSLHAVGVSYWKASEGAEYDDQTSQREKEDDKVFPGGSHTYVWQVLKENGPMASDPLCLTYSYLSHVDLVKDLNSGLIGALLVCREGSLAKEKTQTLHKFILLFAVFDEGKSWHSETKNSLMQDRDAASARAWPKMHTVNGYVNRSLPGLIGCHRKSVYWHVIGMGTTPEVHSIFLEGHTFLVRNHRQASLEISPITFLTAQTLLMDLGQFLLFCHISSHQHDGMEAYVKVDSCPEEPQLRMKNNEEAEDYDDDLTDSEMDVVRFDDDNSPSFIQSRSVAKKHPKTWVHYIAAEEEDWDYAPLVLAPDDRSYKSQYLNNGPQRIGRKYKKVRFMAYTDETFKTREAIQHESGILGPLLYGEVGDTLLIIFKNQASRPYNIYPHGITDVRPLYSRRLPKGVKHLKDFPILPGEIFKYKWTVTVEDGPTKSDPRCLTRYYSSFVNMERDLASGLIGPLLICYKESVDQRGNQIMSDKRNVILFSVFDENRSWYLTENIQRFLPNPAGVQLEDPEFQASNIMHSINGYVFDSLQLSVCLHEVAYWYILSIGAQTDFLSVFFSGYTFKHKMVYEDTLTLFPFSGETVFMSMENPGLWILGCHNSDFRNRGMTALLKVSSCDKNTGDYYEDSYEDISAYLLSKNNAIEPRSFSQNPPVLKRHQREITRTTLQSDQEEIDYDDTISVEMKKEDFDIYDEDENQSPRSFQKKTRHYFIAAVERLWDYGMSSSPHVLRNRAQSGSVPQFKKVVFQEFTDGSFTQPLYRGELNEHLGLLGPYIRAEVEDNIMVTFRNQASRPYSFYSSLISYEEDQRQGAEPRKNFVKPNETKTYFWKVQHHMAPTKDEFDCKAWAYFSDVDLEKDVHSGLIGPLLVCHTNTLNPAHGRQVTVQEFALFFTIFDETKSWYFTENMERNCRAPCNIQMEDPTFKENYRFHAINGYIMDTLPGLVMAQDQRIRWYLLSMGSNENIHSIHFSGHVFTVRKKEEYKMALYNLYPGVFETVEMLPSKAGIWRVECLIGEHLHAGMSTLFLVYSNKCQTPLGMASGHIRDFQITASGQYGQWAPKLARLHYSGSINAWSTKEPFSWIKVDLLAPMIIHGIKTQGARQKFSSLYISQFIIMYSLDGKKWQTYRGNSTGTLMVFFGNVDSSGIKHNIFNPPIIARYIRLHPTHYSIRSTLRMELMGCDLNSCSMPLGMESKAISDAQITASSYFTNMFATWSPSKARLHLQGRSNAWRPQVNNPKEWLQVDFQKTMKVTGVTTQGVKSLLTSMYVKEFLISSSQDGHQWTLFFQNGKVKVFQGNQDSFTPVVNSLDPPLLTRYLRIHPQSWVHQIALRMEVLGCEAQDLY

SEQ ID NO: 2853 - DNA, 4371 bp, synthetic construct
  misc_feature 1..4371: note = Variant of human B-domain deleted Factor VIII
  source 1..4371: mol_type = other DNA
atgcagattgaactgtctacctgcttcttcctctgtttgctgaggttctgctttagcgccactagacggtactaccttggcgctgtggagctgtcctgggactatatgcagagtgatttgggagagcttcccgtcgacgcacgatttcctcctcgcgttccaaagtcatttcccttcaacacaagcgtggtgtacaagaagacgctcttcgtcgaattcaccgatcacctgttcaatatcgccaaacccagaccaccatggatgggtcttttggggcctaccatacaagcggaggtgtatgacacagttgttatcactctcaagaacatggcttctcatccggtaagtcttcacgcagtgggcgtgtcctactggaaagcttcagaaggagccgagtatgatgatcagacatcccagagggagaaagaagacgacaaggtatttccaggtgggtctcatacctatgtgtggcaagtgctcaaagagaatggccctatggcaagcgatccgctctgtttgacttacagctacctttcacacgttgacctcgtcaaggacctcaactccgggttgattggagccttgttggtatgcagggaaggatctcttgccaaagagaagacacagaccctccacaagtttatccttctctttgctgtgttcgatgagggcaaaagttggcatagcgaaacgaagaattccctcatgcaggatcgcgacgcagccagcgccagagcttggcccaagatgcacactgtgaacggatatgtcaataggtcacttcctggcttgattgggtgtcatcggaaaagtgtctactggcacgtgatcggaatggggacaacaccagaggtccactccatatttctcgaaggccataccttccttgttcgaaaccacagacaggcatccttggagatctctcccattacctttctcactgcccaaacgaagcttatggacttgggtcagttccttctcttctgccatatcagctcacaccagcatgatggtatggaagcttatgtgaaagtcgacagttgtcctgaggagccacagttgcgcatgaagaataatgaagaagccgaggattacgacgacgatctcaccgattctgagatggacgtggtgaggtttgatgacgacaactctccctccttcattcaaatccggagcgtggcgaagaaacaccccaagacttgggtccactatatagcggcggaagaggaggattgggattacgctcctcttgtattggcaccagatgaccgctcatacaaaagccagtacctcaacaacggaccgcagagaattggccggaagtataagaaagtgcgatttatggcctatacagacgaaacctttaagacaagggaggccatccagcatgagagtgggattttgggacctcttctttacggcgaagttggtgataccctcctcatcatcttcaagaatcaagcttctcgcccctataacatttacccacacgggatcactgacgttaggcctttgtatagcagaagacttcccaaaggcgtgaagcatctcaaagacttccccattttgccaggcgagatctttaagtacaaatggaccgtcacagtggaagatggaccgactaaatcagaccctcgatgccttacgcggtactattcctccttcgtgaatatggagagagatttggcaagcggactcataggaccactcctcatctgttacaaggaatctgtagaccagaggggtaaccagattatgagtgataaacgcaatgtgatcctttttagcgtcttcgacgagaaccggtcctggtacttgaccgagaatatacaaaggttccttcccaaccccgcaggcgttcagttggaagaccctgagtttcaggccagcaatattatgcactcaatcaacggctatgtgtttgatagtctccagctttctgtttgcctccatgaagtagcctattggtacatcttgtcaattggtgctcaaacagacttcctctccgtcttcttctccggctacacctttaagcacaagatggtgtatgaggacactctcacactctttccattttctggagaaaccgtgttcatgagcatggagaatccaggcctttggatcttgggttgccacaacagtgattttcgcaatcggggaatgactgctctcctcaaagtcagcagctgtgataagaacacaggcgactattacgaagattcttacgaggacataagtgcctacttgttgtccaagaataacgccattgagcccagatcattctcccagaatcctcccgtgcttaaaaggcatcagcgcgaaatcaccagaactactcttcagtctgatcaagaggagattgactatgacgacaccataagcgtggaaatgaagaaggaggatttcgatatctatgacgaagatgagaaccagtctccgcggagctttcagaagaagacgcgacactacttcattgcagcagtcgaaaggctttgggactacggtatgtcatcatcccctcatgtgttgcgcaatagagctcagagtggaagtgttccacagttcaagaaagtcgtctttcaagagtttacagatggcagcttcacacagcctctctatcggggcgagcttaacgaacatttgggactccttggtccctatatccgagccgaagtggaggacaacattatggttacctttaggaatcaagcctctcgcccctacagcttctactcctccctcatcagttatgaggaggatcagagacaaggcgctgaaccacggaagaactttgtgaaaccgaatgagacgaagacctacttctggaaagtacagcaccacatggcccccacaaaagacgaattcgattgcaaagcatgggcgtatttttcagacgttgacttggagaaagatgtacattcaggacttattggtcctttgttggtgtgtcacactaacactctcaatccagcccatggcaggcaggtgacagtccaggaattcgctcttttctttaccatctttgatgagaccaagtcctggtacttcacggaaaacatggagcgcaattgcagagccccctgtaacatacagatggaggaccctacctttaaggaaaattatcggttccacgcaatcaacggatacattatggatacactccctggccttgtgatggctcaggaccaacgaatcaggtggtacctcctcagcatgggttctaatgagaacatacactccattcacttttcaggacatgtgttcactgtccggaagaaagaagagtataagatggccctctacaatttgtatccaggcgtgtttgagaccgttgaaatgcttccctctaaagctggcatctggagagtagagtgcttgatcggagaacatcttcacgcaggtatgagcaccttgttcctcgtgtacagcaacaaatgtcagaccccacttggcatggccagtggacacattcgcgactttcagatcacagcatctggccagtatggacaatgggccccaaagttggctcgcctccattactccggtagcataaatgcgtggtccactaaagaacctttcagctggattaaggtcgatcttcttgcccccatgatcatccacggcattaagacacagggagcgaggcagaaattctcctccctctacatctcacagttcattattatgtatagtttggacggcaagaagtggcaaacttatagaggtaacagtactggaacactcatggtgttcttcggcaacgttgatagctctggcatcaaacacaacatctttaatcctcccataatagctcggtacatcagattgcatccgacccactacagcattaggagtacactccgaatggagcttatgggttgcgacttgaattcctgttcaatgccactcggaatggagtctaaagccatctctgatgcacagataaccgccagtagctactttacgaacatgtttgctacgtggtcaccctctaaggcaaggcttcatttgcaaggccggtctaatgcctggagacctcaggtgaacaacccgaaagaatggctccaggtggactttcagaagaccatgaaagtaacaggtgtcactactcagggagttaagtccttgctcaccagcatgtatgtgaaggagttccttatttcctcatcacaagatggccaccagtggaccctcttctttcagaatggtaaggtcaaagtgtttcagggcaatcaagacagcttcacacccgtggtgaacagtcttgatcctccactcttgacacgataccttcgaatccatccacagtcttgggttcaccagattgcattgcgcatggaagtacttggatgcgaggctcaggacctctac

SEQ ID NO: 2854 - protein, 1457 aa, synthetic construct
  REGION 1..1457: note = Variant of human B-domain deleted Factor VIII
MQIELSTCFFLCLLRFCFSATRRYYLGAVELSWDYMQSDLGELPVDARFPPRVPKSFPFNTSVVYKKTLFVEFTDHLFNIAKPRPPWMGLLGPTIQAEVYDTVVITLKNMASHPVSLHAVGVSYWKASEGAEYDDQTSQREKEDDKVFPGGSHTYVWQVLKENGPMASDPLCLTYSYLSHVDLVKDLNSGLIGALLVCREGSLAKEKTQTLHKFILLFAVFDEGKSWHSETKNSLMQDRDAASARAWPKMHTVNGYVNRSLPGLIGCHRKSVYWHVIGMGTTPEVHSIFLEGHTFLVRNHRQASLEISPITFLTAQTKLMDLGQFLLFCHISSHQHDGMEAYVKVDSCPEEPQLRMKNNEEAEDYDDDLTDSEMDVVRFDDDNSPSFIQIRSVAKKHPKTWVHYIAAEEEDWDYAPLVLAPDDRSYKSQYLNNGPQRIGRKYKKVRFMAYTDETFKTREAIQHESGILGPLLYGEVGDTLLIIFKNQASRPYNIYPHGITDVRPLYSRRLPKGVKHLKDFPILPGEIFKYKWTVTVEDGPTKSDPRCLTRYYSSFVNMERDLASGLIGPLLICYKESVDQRGNQIMSDKRNVILFSVFDENRSWYLTENIQRFLPNPAGVQLEDPEFQASNIMHSINGYVFDSLQLSVCLHEVAYWYILSIGAQTDFLSVFFSGYTFKHKMVYEDTLTLFPFSGETVFMSMENPGLWILGCHNSDFRNRGMTALLKVSSCDKNTGDYYEDSYEDISAYLLSKNNAIEPRSFSQNPPVLKRHQREITRTTLQSDQEEIDYDDTISVEMKKEDFDIYDEDENQSPRSFQKKTRHYFIAAVERLWDYGMSSSPHVLRNRAQSGSVPQFKKVVFQEFTDGSFTQPLYRGELNEHLGLLGPYIRAEVEDNIMVTFRNQASRPYSFYSSLISYEEDQRQGAEPRKNFVKPNETKTYFWKVQHHMAPTKDEFDCKAWAYFSDVDLEKDVHSGLIGPLLVCHTNTLNPAHGRQVTVQEFALFFTIFDETKSWYFTENMERNCRAPCNIQMEDPTFKENYRFHAINGYIMDTLPGLVMAQDQRIRWYLLSMGSNENIHSIHFSGHVFTVRKKEEYKMALYNLYPGVFETVEMLPSKAGIWRVECLIGEHLHAGMSTLFLVYSNKCQTPLGMASGHIRDFQITASGQYGQWAPKLARLHYSGSINAWSTKEPFSWIKVDLLAPMIIHGIKTQGARQKFSSLYISQFIIMYSLDGKKWQTYRGNSTGTLMVFFGNVDSSGIKHNIFNPPIIARYIRLHPTHYSIRSTLRMELMGCDLNSCSMPLGMESKAISDAQITASSYFTNMFATWSPSKARLHLQGRSNAWRPQVNNPKEWLQVDFQKTMKVTGVTTQGVKSLLTSMYVKEFLISSSQDGHQWTLFFQNGKVKVFQGNQDSFTPVVNSLDPPLLTRYLRIHPQSWVHQIALRMEVLGCEAQDLY

SEQ ID NO: 2855 - DNA, 4371 bp, synthetic construct
  misc_feature 1..4371: note = Variant of human B-domain deleted Factor VIII
  source 1..4371: mol_type = other DNA
atgcagattgaactgtctacctgcttcttcctctgtttgctgaggttctgctttagcgccactagacggtactaccttggcgctgtggagctgtcctgggactatatgcagagtgatttgggagagcttcccgtcgacgcacgatttcctcctcgcgttccaaagtcatttcccttcaacacaagcgtggtgtacaagaagacgctcttcgtcgaattcaccgatcacctgttcaatatcgccaaacccagaccaccatggatgggtcttttggggcctaccatacaagcggaggtgtatgacacagttgttatcactctcaagaacatggcttctcatccggtaagtcttcacgcagtgggcgtgtcctactggaaagcttcagaaggagccgagtatgatgatcagacatcccagagggagaaagaagacgacaaggtatttccaggtgggtctcatacctatgtgtggcaagtgctcaaagagaatggccctatggcaagcgatccgctctgtttgacttacagctacctttcacacgttgacctcgtcaaggacctcaactccgggttgattggagccttgttggtatgcagggaaggatctcttgccaaagagaagacacagaccctccacaagtttatccttctctttgctgtgttcgatgagggcaaaagttggcatagcgaaacgaagaattccctcatgcaggatcgcgacgcagccagcgccagagcttggcccaagatgcacactgtgaacggatatgtcaataggtcacttcctggcttgattgggtgtcatcggaaaagtgtctactggcacgtgatcggaatggggacaacaccagaggtccactccatatttctcgaaggccataccttccttgttcgaaaccacagacaggcatccttggagatctctcccattacctttctcactgcccaaacgctccttacggacttgggtcagttccttctcttctgccatatcagctcacaccagcatgatggtatggaagcttatgtgaaagtcgacagttgtcctgaggagccacagttgcgcatgaagaataatgaagaagccgaggattacgacgacgatctcaccgattctgagatggacgtggtgaggtttgatgacgacaactctccctccttcattcaaatccggagcgtggcgaagaaacaccccaagacttgggtccactatatagcggcggaagaggaggattgggattacgctcctcttgtattggcaccagatgaccgctcatacaaaagccagtacctcaacaacggaccgcagagaattggccggaagtataagaaagtgcgatttatggcctatacagacgaaacctttaagacaagggaggccatccagcatgagagtgggattttgggacctcttctttacggcgaagttggtgataccctcctcatcatcttcaagaatcaagcttctcgcccctataacatttacccacacgggatcactgacgttaggcctttgtatagcagaagacttcccaaaggcgtgaagcatctcaaagacttccccattttgccaggcgagatctttaagtacaaatggaccgtcacagtggaagatggaccgactaaatcagaccctcgatgccttacgcggtactattcctccttcgtgaatatggagagagatttggcaagcggactcataggaccactcctcatctgttacaaggaatctgtagaccagaggggtaaccagattatgagtgataaacgcaatgtgatcctttttagcgtcttcgacgagaaccggtcctggtacttgaccgagaatatacaaaggttccttcccaaccccgcaggcgttcagttggaagaccctgagtttcaggccagcaatattatgcactcaatcaacggctatgtgtttgatagtctccagctttctgtttgcctccatgaagtagcctattggtacatcttgtcaattggtgctcaaacagacttcctctccgtcttcttctccggctacacctttaagcacaagatggtgtatgaggacactctcacactctttccattttctggagaaaccgtgttcatgagcatggagaatccaggcctttggatcttgggttgccacaacagtgattttcgcaatcggggaatgactgctctcctcaaagtcagcagctgtgataagaacacaggcgactattacgaagattcttacgaggacataagtgcctacttgttgtccaagaataacgccattgagcccagatcattctcccagaatcctcccgtgcttaaaaggcatcagcgcgaaatcaccagaactactcttcagtctgatcaagaggagattgactatgacgacaccataagcgtggaaatgaagaaggaggatttcgatatctatgacgaagatgagaaccagtctccgcggagctttcagaagaagacgcgacactacttcattgcagcagtcgaaaggctttgggactacggtatgtcatcatcccctcatgtgttgcgcaatagagctcagagtggaagtgttccacagttcaagaaagtcgtctttcaagagtttacagatggcagcttcacacagcctctctatcggggcgagcttaacgaacatttgggactccttggtccctatatccgagccgaagtggaggacaacattatggttacctttaggaatcaagcctctcgcccctacagcttctactcctccctcatcagttatgaggaggatcagagacaaggcgctgaaccacggaagaactttgtgaaaccgaatgagacgaagacctacttctggaaagtacagcaccacatggcccccacaaaagacgaattcgattgcaaagcatgggcgtatttttcagacgttgacttggagaaagatgtacattcaggacttattggtcctttgttggtgtgtcacactaacactctcaatccagcccatggcaggcaggtgacagtccaggaattcgctcttttctttaccatctttgatgagaccaagtcctggtacttcacggaaaacatggagcgcaattgcagagccccctgtaacatacagatggaggaccctacctttaaggaaaattatcggttccacgcaatcaacggatacattatggatacactccctggccttgtgatggctcaggaccaacgaatcaggtggtacctcctcagcatgggttctaatgagaacatacactccattcacttttcaggacatgtgttcactgtccggaagaaagaagagtataagatggccctctacaatttgtatccaggcgtgtttgagaccgttgaaatgcttccctctaaagctggcatctggagagtagagtgcttgatcggagaacatcttcacgcaggtatgagcaccttgttcctcgtgtacagcaacaaatgtcagaccccacttggcatggccagtggacacattcgcgactttcagatcacagcatctggccagtatggacaatgggccccaaagttggctcgcctccattactccggtagcataaatgcgtggtccactaaagaacctttcagctggattaaggtcgatcttcttgcccccatgatcatccacggcattaagacacagggagcgaggcagaaattctcctccctctacatctcacagttcattattatgtatagtttggacggcaagaagtggcaaacttatagaggtaacagtactggaacactcatggtgttcttcggcaacgttgatagctctggcatcaaacacaacatctttaatcctcccataatagctcggtacatcagattgcatccgacccactacagcattaggagtacactccgaatggagcttatgggttgcgacttgaattcctgttcaatgccactcggaatggagtctaaagccatctctgatgcacagataaccgccagtagctactttacgaacatgtttgctacgtggtcaccctctaaggcaaggcttcatttgcaaggccggtctaatgcctggagacctcaggtgaacaacccgaaagaatggctccaggtggactttcagaagaccatgaaagtaacaggtgtcactactcagggagttaagtccttgctcaccagcatgtatgtgaaggagttccttatttcctcatcacaagatggccaccagtggaccctcttctttcagaatggtaaggtcaaagtgtttcagggcaatcaagacagcttcacacccgtggtgaacagtcttgatcctccactcttgacacgataccttcgaatccatccacagtcttgggttcaccagattgcattgcgcatggaagtacttggatgcgaggctcaggacctctac

SEQ ID NO: 2856 - protein, 1457 aa, synthetic construct
  REGION 1..1457: note = Variant of human B-domain deleted Factor VIII
MQIELSTCFFLCLLRFCFSATRRYYLGAVELSWDYMQSDLGELPVDARFPPRVPKSFPFNTSVVYKKTLFVEFTDHLFNIAKPRPPWMGLLGPTIQAEVYDTVVITLKNMASHPVSLHAVGVSYWKASEGAEYDDQTSQREKEDDKVFPGGSHTYVWQVLKENGPMASDPLCLTYSYLSHVDLVKDLNSGLIGALLVCREGSLAKEKTQTLHKFILLFAVFDEGKSWHSETKNSLMQDRDAASARAWPKMHTVNGYVNRSLPGLIGCHRKSVYWHVIGMGTTPEVHSIFLEGHTFLVRNHRQASLEISPITFLTAQTLLTDLGQFLLFCHISSHQHDGMEAYVKVDSCPEEPQLRMKNNEEAEDYDDDLTDSEMDVVRFDDDNSPSFIQIRSVAKKHPKTWVHYIAAEEEDWDYAPLVLAPDDRSYKSQYLNNGPQRIGRKYKKVRFMAYTDETFKTREAIQHESGILGPLLYGEVGDTLLIIFKNQASRPYNIYPHGITDVRPLYSRRLPKGVKHLKDFPILPGEIFKYKWTVTVEDGPTKSDPRCLTRYYSSFVNMERDLASGLIGPLLICYKESVDQRGNQIMSDKRNVILFSVFDENRSWYLTENIQRFLPNPAGVQLEDPEFQASNIMHSINGYVFDSLQLSVCLHEVAYWYILSIGAQTDFLSVFFSGYTFKHKMVYEDTLTLFPFSGETVFMSMENPGLWILGCHNSDFRNRGMTALLKVSSCDKNTGDYYEDSYEDISAYLLSKNNAIEPRSFSQNPPVLKRHQREITRTTLQSDQEEIDYDDTISVEMKKEDFDIYDEDENQSPRSFQKKTRHYFIAAVERLWDYGMSSSPHVLRNRAQSGSVPQFKKVVFQEFTDGSFTQPLYRGELNEHLGLLGPYIRAEVEDNIMVTFRNQASRPYSFYSSLISYEEDQRQGAEPRKNFVKPNETKTYFWKVQHHMAPTKDEFDCKAWAYFSDVDLEKDVHSGLIGPLLVCHTNTLNPAHGRQVTVQEFALFFTIFDETKSWYFTENMERNCRAPCNIQMEDPTFKENYRFHAINGYIMDTLPGLVMAQDQRIRWYLLSMGSNENIHSIHFSGHVFTVRKKEEYKMALYNLYPGVFETVEMLPSKAGIWRVECLIGEHLHAGMSTLFLVYSNKCQTPLGMASGHIRDFQITASGQYGQWAPKLARLHYSGSINAWSTKEPFSWIKVDLLAPMIIHGIKTQGARQKFSSLYISQFIIMYSLDGKKWQTYRGNSTGTLMVFFGNVDSSGIKHNIFNPPIIARYIRLHPTHYSIRSTLRMELMGCDLNSCSMPLGMESKAISDAQITASSYFTNMFATWSPSKARLHLQGRSNAWRPQVNNPKEWLQVDFQKTMKVTGVTTQGVKSLLTSMYVKEFLISSSQDGHQWTLFFQNGKVKVFQGNQDSFTPVVNSLDPPLLTRYLRIHPQSWVHQIALRMEVLGCEAQDLY

SEQ ID NO: 2857 - DNA, 4371 bp, synthetic construct
  misc_feature 1..4371: note = Variant of human B-domain deleted Factor VIII
  source 1..4371: mol_type = other DNA
atgcagattgaactgtctacctgcttcttcctctgtttgctgaggttctgctttagcgccactagacggtactaccttggcgctgtggagctgtcctgggactatatgcagagtgatttgggagagcttcccgtcgacgcacgatttcctcctcgcgttccaaagtcatttcccttcaacacaagcgtggtgtacaagaagacgctcttcgtcgaattcaccgatcacctgttcaatatcgccaaacccagaccaccatggatgggtcttttggggcctaccatacaagcggaggtgtatgacacagttgttatcactctcaagaacatggcttctcatccggtaagtcttcacgcagtgggcgtgtcctactggaaagcttcagaaggagccgagtatgatgatcagacatcccagagggagaaagaagacgacaaggtatttccaggtgggtctcatacctatgtgtggcaagtgctcaaagagaatggccctatggcaagcgatccggattgtttgacttacagctacctttcacacgttgacctcgtcaaggacctcaactccgggttgattggagccttgttggtatgcagggaaggatctcttgccaaagagaagacacagaccctccacaagtttatccttctctttgctgtgttcgatgagggcaaaagttggcatagcgaaacgaagaattccctcatgcaggatcgcgacgcagccagcgccagagcttggcccaagatgcacactgtgaacggatatgtcaataggtcacttcctggcttgattgggtgtcatcggaaaagtgtctactggcacgtgatcggaatggggacaacaccagaggtccactccatatttctcgaaggccataccttccttgttcgaaaccacagacaggcatccttggagatctctcccattacctttctcactgcccaaacgctccttatggacttgggtcagttccttctcttctgccatatcagctcacaccagcatgatggtatggaagcttatgtgaaagtcgacagttgtcctgaggagccacagttgcgcatgaagaataatgaagaagccgaggattacgacgacgatctcaccgattctgagatggacgtggtgaggtttgatgacgacaactctccctccttcattcaaatccggagcgtggcgaagaaacaccccaagacttgggtccactatatagcggcggaagaggaggattgggattacgctcctcttgtattggcaccagatgaccgctcatacaaaagccagtacctcaacaacggaccgcagagaattggccggaagtataagaaagtgcgatttatggcctatacagacgaaacctttaagacaagggaggccatccagcatgagagtgggattttgggacctcttctttacggcgaagttggtgataccctcctcatcatcttcaagaatcaagcttctcgcccctataacatttacccacacgggatcactgacgttaggcctttgtatagcagaagacttcccaaaggcgtgaagcatctcaaagacttccccattttgccaggcgagatctttaagtacaaatggaccgtcacagtggaagatggaccgactaaatcagaccctcgatgccttacgcggtactattcctccttcgtgaatatggagagagatttggcaagcggactcataggaccactcctcatctgttacaaggaatctgtagaccagaggggtaaccagattatgagtgataaacgcaatgtgatcctttttagcgtcttcgacgagaaccggtcctggtacttgaccgagaatatacaaaggttccttcccaaccccgcaggcgttcagttggaagaccctgagtttcaggccagcaatattatgcactcaatcaacggctatgtgtttgatagtctccagctttctgtttgcctccatgaagtagcctattggtacatcttgtcaattggtgctcaaacagacttcctctccgtcttcttctccggctacacctttaagcacaagatggtgtatgaggacactctcacactctttccattttctggagaaaccgtgttcatgagcatggagaatccaggcctttggatcttgggttgccacaacagtgattttcgcaatcggggaatgactgctctcctcaaagtcagcagctgtgataagaacacaggcgactattacgaagattcttacgaggacataagtgcctacttgttgtccaagaataacgccattgagcccagatcattctcccagaatcctcccgtgcttaaaaggcatcagcgcgaaatcaccagaactactcttcagtctgatcaagaggagattgactatgacgacaccataagcgtggaaatgaagaaggaggatttcgatatctatgacgaagatgagaaccagtctccgcggagctttcagaagaagacgcgacactacttcattgcagcagtcgaaaggctttgggactacggtatgtcatcatcccctcatgtgttgcgcaatagagctcagagtggaagtgttccacagttcaagaaagtcgtctttcaagagtttacagatggcagcttcacacagcctctctatcggggcgagcttaacgaacatttgggactccttggtccctatatccgagccgaagtggaggacaacattatggttacctttaggaatcaagcctctcgcccctacagcttctactcctccctcatcagttatgaggaggatcagagacaaggcgctgaaccacggaagaactttgtgaaaccgaatgagacgaagacctacttctggaaagtacagcaccacatggcccccacaaaagacgaattcgattgcaaagcatgggcgtatttttcagacgttgacttggagaaagatgtacattcaggacttattggtcctttgttggtgtgtcacactaacactctcaatccagcccatggcaggcaggtgacagtccaggaattcgctcttttctttaccatctttgatgagaccaagtcctggtacttcacggaaaacatggagcgcaattgcagagccccctgtaacatacagatggaggaccctacctttaaggaaaattatcggttccacgcaatcaacggatacattatggatacactccctggccttgtgatggctcaggaccaacgaatcaggtggtacctcctcagcatgggttctaatgagaacatacactccattcacttttcaggacatgtgttcactgtccggaagaaagaagagtataagatggccctctacaatttgtatccaggcgtgtttgagaccgttgaaatgcttccctctaaagctggcatctggagagtagagtgcttgatcggagaacatcttcacgcaggtatgagcaccttgttcctcgtgtacagcaacaaatgtcagaccccacttggcatggccagtggacacattcgcgactttcagatcacagcatctggccagtatggacaatgggccccaaagttggctcgcctccattactccggtagcataaatgcgtggtccactaaagaacctttcagctggattaaggtcgatcttcttgcccccatgatcatccacggcattaagacacagggagcgaggcagaaattctcctccctctacatctcacagttcattattatgtatagtttggacggcaagaagtggcaaacttatagaggtaacagtactggaacactcatggtgttcttcggcaacgttgatagctctggcatcaaacacaacatctttaatcctcccataatagctcggtacatcagattgcatccgacccactacagcattaggagtacactccgaatggagcttatgggttgcgacttgaattcctgttcaatgccactcggaatggagtctaaagccatctctgatgcacagataaccgccagtagctactttacgaacatgtttgctacgtggtcaccctctaaggcaaggcttcatttgcaaggccggtctaatgcctggagacctcaggtgaacaacccgaaagaatggctccaggtggactttcagaagaccatgaaagtaacaggtgtcactactcagggagttaagtccttgctcaccagcatgtatgtgaaggagttccttatttcctcatcacaagatggccaccagtggaccctcttctttcagaatggtaaggtcaaagtgtttcagggcaatcaagacagcttcacacccgtggtgaacagtcttgatcctccactcttgacacgataccttcgaatccatccacagtcttgggttcaccagattgcattgcgcatggaagtacttggatgcgaggctcaggacctctac

SEQ ID NO: 2858 - protein, 1457 aa, synthetic construct
  REGION 1..1457: note = Variant of human B-domain deleted Factor VIII
MQIELSTCFFLCLLRFCFSATRRYYLGAVELSWDYMQSDLGELPVDARFPPRVPKSFPFNTSVVYKKTLFVEFTDHLFNIAKPRPPWMGLLGPTIQAEVYDTVVITLKNMASHPVSLHAVGVSYWKASEGAEYDDQTSQREKEDDKVFPGGSHTYVWQVLKENGPMASDPDCLTYSYLSHVDLVKDLNSGLIGALLVCREGSLAKEKTQTLHKFILLFAVFDEGKSWHSETKNSLMQDRDAASARAWPKMHTVNGYVNRSLPGLIGCHRKSVYWHVIGMGTTPEVHSIFLEGHTFLVRNHRQASLEISPITFLTAQTLLMDLGQFLLFCHISSHQHDGMEAYVKVDSCPEEPQLRMKNNEEAEDYDDDLTDSEMDVVRFDDDNSPSFIQIRSVAKKHPKTWVHYIAAEEEDWDYAPLVLAPDDRSYKSQYLNNGPQRIGRKYKKVRFMAYTDETFKTREAIQHESGILGPLLYGEVGDTLLIIFKNQASRPYNIYPHGITDVRPLYSRRLPKGVKHLKDFPILPGEIFKYKWTVTVEDGPTKSDPRCLTRYYSSFVNMERDLASGLIGPLLICYKESVDQRGNQIMSDKRNVILFSVFDENRSWYLTENIQRFLPNPAGVQLEDPEFQASNIMHSINGYVFDSLQLSVCLHEVAYWYILSIGAQTDFLSVFFSGYTFKHKMVYEDTLTLFPFSGETVFMSMENPGLWILGCHNSDFRNRGMTALLKVSSCDKNTGDYYEDSYEDISAYLLSKNNAIEPRSFSQNPPVLKRHQREITRTTLQSDQEEIDYDDTISVEMKKEDFDIYDEDENQSPRSFQKKTRHYFIAAVERLWDYGMSSSPHVLRNRAQSGSVPQFKKVVFQEFTDGSFTQPLYRGELNEHLGLLGPYIRAEVEDNIMVTFRNQASRPYSFYSSLISYEEDQRQGAEPRKNFVKPNETKTYFWKVQHHMAPTKDEFDCKAWAYFSDVDLEKDVHSGLIGPLLVCHTNTLNPAHGRQVTVQEFALFFTIFDETKSWYFTENMERNCRAPCNIQMEDPTFKENYRFHAINGYIMDTLPGLVMAQDQRIRWYLLSMGSNENIHSIHFSGHVFTVRKKEEYKMALYNLYPGVFETVEMLPSKAGIWRVECLIGEHLHAGMSTLFLVYSNKCQTPLGMASGHIRDFQITASGQYGQWAPKLARLHYSGSINAWSTKEPFSWIKVDLLAPMIIHGIKTQGARQKFSSLYISQFIIMYSLDGKKWQTYRGNSTGTLMVFFGNVDSSGIKHNIFNPPIIARYIRLHPTHYSIRSTLRMELMGCDLNSCSMPLGMESKAISDAQITASSYFTNMFATWSPSKARLHLQGRSNAWRPQVNNPKEWLQVDFQKTMKVTGVTTQGVKSLLTSMYVKEFLISSSQDGHQWTLFFQNGKVKVFQGNQDSFTPVVNSLDPPLLTRYLRIHPQSWVHQIALRMEVLGCEAQDLY

SEQ ID NO: 2859 - DNA, 4371 bp, synthetic construct
  misc_feature 1..4371: note = Variant of human B-domain deleted Factor VIII
  source 1..4371: mol_type = other DNA
atgcagattgaactgtctacctgcttcttcctctgtttgctgaggttctgctttagcgccactagacggtactaccttggcgctgtggagctgtcctgggactatatgcagagtgatttgggagagcttcccgtcgacgcacgatttcctcctcgcgttccaaagtcatttcccttcaacacaagcgtggtgtacaagaagacgctcttcgtcgaattcaccgatcacctgttcaatatcgccaaacccagaccaccatggatgggtcttttggggcctaccatacaagcggaggtgtatgacacagttgttatcactctcaagaacatggcttctcatccggtaagtcttcacgcagtgggcgtgtcctactggaaagcttcagaaggagccgagtatgatgatcagacatcccagagggagaaagaagacgacaaggtatttccaggtgggtctcatacctatgtgtggcaagtgctcaaagagaatggccctatggcaagcgatccggagtgtttgacttacagctacctttcacacgttgacctcgtcaaggacctcaactccgggttgattggagccttgttggtatgcagggaaggatctcttgccaaagagaagacacagaccctccacaagtttatccttctctttgctgtgttcgatgagggcaaaagttggcatagcgaaacgaagaattccctcatgcaggatcgcgacgcagccagcgccagagcttggcccaagatgcacactgtgaacggatatgtcaataggtcacttcctggcttgattgggtgtcatcggaaaagtgtctactggcacgtgatcggaatggggacaacaccagaggtccactccatatttctcgaaggccataccttccttgttcgaaaccacagacaggcatccttggagatctctcccattacctttctcactgcccaaacgctccttatggacttgggtcagttccttctcttctgccatatcagctcacaccagcatgatggtatggaagcttatgtgaaagtcgacagttgtcctgaggagccacagttgcgcatgaagaataatgaagaagccgaggattacgacgacgatctcaccgattctgagatggacgtggtgaggtttgatgacgacaactctccctccttcattcaaatccggagcgtggcgaagaaacaccccaagacttgggtccactatatagcggcggaagaggaggattgggattacgctcctcttgtattggcaccagatgaccgctcatacaaaagccagtacctcaacaacggaccgcagagaattggccggaagtataagaaagtgcgatttatggcctatacagacgaaacctttaagacaagggaggccatccagcatgagagtgggattttgggacctcttctttacggcgaagttggtgataccctcctcatcatcttcaagaatcaagcttctcgcccctataacatttacccacacgggatcactgacgttaggcctttgtatagcagaagacttcccaaaggcgtgaagcatctcaaagacttccccattttgccaggcgagatctttaagtacaaatggaccgtcacagtggaagatggaccgactaaatcagaccctcgatgccttacgcggtactattcctccttcgtgaatatggagagagatttggcaagcggactcataggaccactcctcatctgttacaaggaatctgtagaccagaggggtaaccagattatgagtgataaacgcaatgtgatcctttttagcgtcttcgacgagaaccggtcctggtacttgaccgagaatatacaaaggttccttcccaaccccgcaggcgttcagttggaagaccctgagtttcaggccagcaatattatgcactcaatcaacggctatgtgtttgatagtctccagctttctgtttgcctccatgaagtagcctattggtacatcttgtcaattggtgctcaaacagacttcctctccgtcttcttctccggctacacctttaagcacaagatggtgtatgaggacactctcacactctttccattttctggagaaaccgtgttcatgagcatggagaatccaggcctttggatcttgggttgccacaacagtgattttcgcaatcggggaatgactgctctcctcaaagtcagcagctgtgataagaacacaggcgactattacgaagattcttacgaggacataagtgcctacttgttgtccaagaataacgccattgagcccagatcattctcccagaatcctcccgtgcttaaaaggcatcagcgcgaaatcaccagaactactcttcagtctgatcaagaggagattgactatgacgacaccataagcgtggaaatgaagaaggaggatttcgatatctatgacgaagatgagaaccagtctccgcggagctttcagaagaagacgcgacactacttcattgcagcagtcgaaaggctttgggactacggtatgtcatcatcccctcatgtgttgcgcaatagagctcagagtggaagtgttccacagttcaagaaagtcgtctttcaagagtttacagatggcagcttcacacagcctctctatcggggcgagcttaacgaacatttgggactccttggtccctatatccgagccgaagtggaggacaacattatggttacctttaggaatcaagcctctcgcccctacagcttctactcctccctcatcagttatgaggaggatcagagacaaggcgctgaaccacggaagaactttgtgaaaccgaatgagacgaagacctacttctggaaagtacagcaccacatggcccccacaaaagacgaattcgattgcaaagcatgggcgtatttttcagacgttgacttggagaaagatgtacattcaggacttattggtcctttgttggtgtgtcacactaacactctcaatccagcccatggcaggcaggtgacagtccaggaattcgctcttttctttaccatctttgatgagaccaagtcctggtacttcacggaaaacatggagcgcaattgcagagccccctgtaacatacagatggaggaccctacctttaaggaaaattatcggttccacgcaatcaacggatacattatggatacactccctggccttgtgatggctcaggaccaacgaatcaggtggtacctcctcagcatgggttctaatgagaacatacactccattcacttttcaggacatgtgttcactgtccggaagaaagaagagtataagatggccctctacaatttgtatccaggcgtgtttgagaccgttgaaatgcttccctctaaagctggcatctggagagtagagtgcttgatcggagaacatcttcacgcaggtatgagcaccttgttcctcgtgtacagcaacaaatgtcagaccccacttggcatggccagtggacacattcgcgactttcagatcacagcatctggccagtatggacaatgggccccaaagttggctcgcctccattactccggtagcataaatgcgtggtccactaaagaacctttcagctggattaaggtcgatcttcttgcccccatgatcatccacggcattaagacacagggagcgaggcagaaattctcctccctctacatctcacagttcattattatgtatagtttggacggcaagaagtggcaaacttatagaggtaacagtactggaacactcatggtgttcttcggcaacgttgatagctctggcatcaaacacaacatctttaatcctcccataatagctcggtacatcagattgcatccgacccactacagcattaggagtacactccgaatggagcttatgggttgcgacttgaattcctgttcaatgccactcggaatggagtctaaagccatctctgatgcacagataaccgccagtagctactttacgaacatgtttgctacgtggtcaccctctaaggcaaggcttcatttgcaaggccggtctaatgcctggagacctcaggtgaacaacccgaaagaatggctccaggtggactttcagaagaccatgaaagtaacaggtgtcactactcagggagttaagtccttgctcaccagcatgtatgtgaaggagttccttatttcctcatcacaagatggccaccagtggaccctcttctttcagaatggtaaggtcaaagtgtttcagggcaatcaagacagcttcacacccgtggtgaacagtcttgatcctccactcttgacacgataccttcgaatccatccacagtcttgggttcaccagattgcattgcgcatggaagtacttggatgcgaggctcaggacctctac

SEQ ID NO: 2860 - protein, 1457 aa, synthetic construct
  REGION 1..1457: note = Variant of human B-domain deleted Factor VIII
MQIELSTCFFLCLLRFCFSATRRYYLGAVELSWDYMQSDLGELPVDARFPPRVPKSFPFNTSVVYKKTLFVEFTDHLFNIAKPRPPWMGLLGPTIQAEVYDTVVITLKNMASHPVSLHAVGVSYWKASEGAEYDDQTSQREKEDDKVFPGGSHTYVWQVLKENGPMASDPECLTYSYLSHVDLVKDLNSGLIGALLVCREGSLAKEKTQTLHKFILLFAVFDEGKSWHSETKNSLMQDRDAASARAWPKMHTVNGYVNRSLPGLIGCHRKSVYWHVIGMGTTPEVHSIFLEGHTFLVRNHRQASLEISPITFLTAQTLLMDLGQFLLFCHISSHQHDGMEAYVKVDSCPEEPQLRMKNNEEAEDYDDDLTDSEMDVVRFDDDNSPSFIQIRSVAKKHPKTWVHYIAAEEEDWDYAPLVLAPDDRSYKSQYLNNGPQRIGRKYKKVRFMAYTDETFKTREAIQHESGILGPLLYGEVGDTLLIIFKNQASRPYNIYPHGITDVRPLYSRRLPKGVKHLKDFPILPGEIFKYKWTVTVEDGPTKSDPRCLTRYYSSFVNMERDLASGLIGPLLICYKESVDQRGNQIMSDKRNVILFSVFDENRSWYLTENIQRFLPNPAGVQLEDPEFQASNIMHSINGYVFDSLQLSVCLHEVAYWYILSIGAQTDFLSVFFSGYTFKHKMVYEDTLTLFPFSGETVFMSMENPGLWILGCHNSDFRNRGMTALLKVSSCDKNTGDYYEDSYEDISAYLLSKNNAIEPRSFSQNPPVLKRHQREITRTTLQSDQEEIDYDDTISVEMKKEDFDIYDEDENQSPRSFQKKTRHYFIAAVERLWDYGMSSSPHVLRNRAQSGSVPQFKKVVFQEFTDGSFTQPLYRGELNEHLGLLGPYIRAEVEDNIMVTFRNQASRPYSFYSSLISYEEDQRQGAEPRKNFVKPNETKTYFWKVQHHMAPTKDEFDCKAWAYFSDVDLEKDVHSGLIGPLLVCHTNTLNPAHGRQVTVQEFALFFTIFDETKSWYFTENMERNCRAPCNIQMEDPTFKENYRFHAINGYIMDTLPGLVMAQDQRIRWYLLSMGSNENIHSIHFSGHVFTVRKKEEYKMALYNLYPGVFETVEMLPSKAGIWRVECLIGEHLHAGMSTLFLVYSNKCQTPLGMASGHIRDFQITASGQYGQWAPKLARLHYSGSINAWSTKEPFSWIKVDLLAPMIIHGIKTQGARQKFSSLYISQFIIMYSLDGKKWQTYRGNSTGTLMVFFGNVDSSGIKHNIFNPPIIARYIRLHPTHYSIRSTLRMELMGCDLNSCSMPLGMESKAISDAQITASSYFTNMFATWSPSKARLHLQGRSNAWRPQVNNPKEWLQVDFQKTMKVTGVTTQGVKSLLTSMYVKEFLISSSQDGHQWTLFFQNGKVKVFQGNQDSFTPVVNSLDPPLLTRYLRIHPQSWVHQIALRMEVLGCEAQDLY

SEQ ID NO: 2861 - DNA, 4371 bp, synthetic construct
  misc_feature 1..4371: note = Variant of human B-domain deleted Factor VIII
  source 1..4371: mol_type = other DNA
atgcagattgaactgtctacctgcttcttcctctgtttgctgaggttctgctttagcgccactagacggtactaccttggcgctgtggagctgtcctgggactatatgcagagtgatttgggagagcttcccgtcgacgcacgatttcctcctcgcgttccaaagtcatttcccttcaacacaagcgtggtgtacaagaagacgctcttcgtcgaattcaccgatcacctgttcaatatcgccaaacccagaccaccatggatgggtcttttggggcctaccatacaagcggaggtgtatgacacagttgttatcactctcaagaacatggcttctcatccggtaagtcttcacgcagtgggcgtgtcctactggaaagcttcagaaggagccgagtatgatgatcagacatcccagagggagaaagaagacgacaaggtatttccaggtgggtctcatacctatgtgtggcaagtgctcaaagagaatggccctatggcaagcgatccgctctgtttgacttacagctacctttcacacgttgacctcgtcaaggacctcaactccgggttgattggagccttgttggtatgcagggaaggatctcttgccaaagagaagacacagaccctccacaagtttatccttctctttgctgtgttcgatgagggcaaaagttggcatagcgaaacgaagaattccctcatgcaggatcgcgacgcagccagcgccagagcttggcccaagatgcacactgtgaacggatatgtcaataggtcacttcctggcttgattgggtgtcatcggaaaagtgtctactggcacgtgatcggaatggggacaacaccagaggtccactccatatttctcgaaggccataccttccttgttcgaaaccacagacaggcatccttggagatctctcccattacctttctcactgcccaaacgctccttgtggacttgggtcagttccttctcttctgccatatcagctcacaccagcatgatggtatggaagcttatgtgaaagtcgacagttgtcctgaggagccacagttgcgcatgaagaataatgaagaagccgaggattacgacgacgatctcaccgattctgagatggacgtggtgaggtttgatgacgacaactctccctccttcattcaaatccggagcgtggcgaagaaacaccccaagacttgggtccactatatagcggcggaagaggaggattgggattacgctcctcttgtattggcaccagatgaccgctcatacaaaagccagtacctcaacaacggaccgcagagaattggccggaagtataagaaagtgcgatttatggcctatacagacgaaacctttaagacaagggaggccatccagcatgagagtgggattttgggacctcttctttacggcgaagttggtgataccctcctcatcatcttcaagaatcaagcttctcgcccctataacatttacccacacgggatcactgacgttaggcctttgtatagcagaagacttcccaaaggcgtgaagcatctcaaagacttccccattttgccaggcgagatctttaagtacaaatggaccgtcacagtggaagatggaccgactaaatcagaccctcgatgccttacgcggtactattcctccttcgtgaatatggagagagatttggcaagcggactcataggaccactcctcatctgttacaaggaatctgtagaccagaggggtaaccagattatgagtgataaacgcaatgtgatcctttttagcgtcttcgacgagaaccggtcctggtacttgaccgagaatatacaaaggttccttcccaaccccgcaggcgttcagttggaagaccctgagtttcaggccagcaatattatgcactcaatcaacggctatgtgtttgatagtctccagctttctgtttgcctccatgaagtagcctattggtacatcttgtcaattggtgctcaaacagacttcctctccgtcttcttctccggctacacctttaagcacaagatggtgtatgaggacactctcacactctttccattttctggagaaaccgtgttcatgagcatggagaatccaggcctttggatcttgggttgccacaacagtgattttcgcaatcggggaatgactgctctcctcaaagtcagcagctgtgataagaacacaggcgactattacgaagattcttacgaggacataagtgcctacttgttgtccaagaataacgccattgagcccagatcattctcccagaatcctcccgtgcttaaaaggcatcagcgcgaaatcaccagaactactcttcagtctgatcaagaggagattgactatgacgacaccataagcgtggaaatgaagaaggaggatttcgatatctatgacgaagatgagaaccagtctccgcggagctttcagaagaagacgcgacactacttcattgcagcagtcgaaaggctttgggactacggtatgtcatcatcccctcatgtgttgcgcaatagagctcagagtggaagtgttccacagttcaagaaagtcgtctttcaagagtttacagatggcagcttcacacagcctctctatcggggcgagcttaacgaacatttgggactccttggtccctatatccgagccgaagtggaggacaacattatggttacctttaggaatcaagcctctcgcccctacagcttctactcctccctcatcagttatgaggaggatcagagacaaggcgctgaaccacggaagaactttgtgaaaccgaatgagacgaagacctacttctggaaagtacagcaccacatggcccccacaaaagacgaattcgattgcaaagcatgggcgtatttttcagacgttgacttggagaaagatgtacattcaggacttattggtcctttgttggtgtgtcacactaacactctcaatccagcccatggcaggcaggtgacagtccaggaattcgctcttttctttaccatctttgatgagaccaagtcctggtacttcacggaaaacatggagcgcaattgcagagccccctgtaacatacagatggaggaccctacctttaaggaaaattatcggttccacgcaatcaacggatacattatggatacactccctggccttgtgatggctcaggaccaacgaatcaggtggtacctcctcagcatgggttctaatgagaacatacactccattcacttttcaggacatgtgttcactgtccggaagaaagaagagtataagatggccctctacaatttgtatccaggcgtgtttgagaccgttgaaatgcttccctctaaagctggcatctggagagtagagtgcttgatcggagaacatcttcacgcaggtatgagcaccttgttcctcgtgtacagcaacaaatgtcagaccccacttggcatggccagtggacacattcgcgactttcagatcacagcatctggccagtatggacaatgggccccaaagttggctcgcctccattactccggtagcataaatgcgtggtccactaaagaacctttcagctggattaaggtcgatcttcttgcccccatgatcatccacggcattaagacacagggagcgaggcagaaattctcctccctctacatctcacagttcattattatgtatagtttggacggcaagaagtggcaaacttatagaggtaacagtactggaacactcatggtgttcttcggcaacgttgatagctctggcatcaaacacaacatctttaatcctcccataatagctcggtacatcagattgcatccgacccactacagcattaggagtacactccgaatggagcttatgggttgcgacttgaattcctgttcaatgccactcggaatggagtctaaagccatctctgatgcacagataaccgccagtagctactttacgaacatgtttgctacgtggtcaccctctaaggcaaggcttcatttgcaaggccggtctaatgcctggagacctcaggtgaacaacccgaaagaatggctccaggtggactttcagaagaccatgaaagtaacaggtgtcactactcagggagttaagtccttgctcaccagcatgtatgtgaaggagttccttatttcctcatcacaagatggccaccagtggaccctcttctttcagaatggtaaggtcaaagtgtttcagggcaatcaagacagcttcacacccgtggtgaacagtcttgatcctccactcttgacacgataccttcgaatccatccacagtcttgggttcaccagattgcattgcgcatggaagtacttggatgcgaggctcaggacctctac

SEQ ID NO: 2862 - protein, 1457 aa, synthetic construct
  REGION 1..1457: note = Variant of human B-domain deleted Factor VIII
MQIELSTCFFLCLLRFCFSATRRYYLGAVELSWDYMQSDLGELPVDARFPPRVPKSFPFNTSVVYKKTLFVEFTDHLFNIAKPRPPWMGLLGPTIQAEVYDTVVITLKNMASHPVSLHAVGVSYWKASEGAEYDDQTSQREKEDDKVFPGGSHTYVWQVLKENGPMASDPLCLTYSYLSHVDLVKDLNSGLIGALLVCREGSLAKEKTQTLHKFILLFAVFDEGKSWHSETKNSLMQDRDAASARAWPKMHTVNGYVNRSLPGLIGCHRKSVYWHVIGMGTTPEVHSIFLEGHTFLVRNHRQASLEISPITFLTAQTLLVDLGQFLLFCHISSHQHDGMEAYVKVDSCPEEPQLRMKNNEEAEDYDDDLTDSEMDVVRFDDDNSPSFIQIRSVAKKHPKTWVHYIAAEEEDWDYAPLVLAPDDRSYKSQYLNNGPQRIGRKYKKVRFMAYTDETFKTREAIQHESGILGPLLYGEVGDTLLIIFKNQASRPYNIYPHGITDVRPLYSRRLPKGVKHLKDFPILPGEIFKYKWTVTVEDGPTKSDPRCLTRYYSSFVNMERDLASGLIGPLLICYKESVDQRGNQIMSDKRNVILFSVFDENRSWYLTENIQRFLPNPAGVQLEDPEFQASNIMHSINGYVFDSLQLSVCLHEVAYWYILSIGAQTDFLSVFFSGYTFKHKMVYEDTLTLFPFSGETVFMSMENPGLWILGCHNSDFRNRGMTALLKVSSCDKNTGDYYEDSYEDISAYLLSKNNAIEPRSFSQNPPVLKRHQREITRTTLQSDQEEIDYDDTISVEMKKEDFDIYDEDENQSPRSFQKKTRHYFIAAVERLWDYGMSSSPHVLRNRAQSGSVPQFKKVVFQEFTDGSFTQPLYRGELNEHLGLLGPYIRAEVEDNIMVTFRNQASRPYSFYSSLISYEEDQRQGAEPRKNFVKPNETKTYFWKVQHHMAPTKDEFDCKAWAYFSDVDLEKDVHSGLIGPLLVCHTNTLNPAHGRQVTVQEFALFFTIFDETKSWYFTENMERNCRAPCNIQMEDPTFKENYRFHAINGYIMDTLPGLVMAQDQRIRWYLLSMGSNENIHSIHFSGHVFTVRKKEEYKMALYNLYPGVFETVEMLPSKAGIWRVECLIGEHLHAGMSTLFLVYSNKCQTPLGMASGHIRDFQITASGQYGQWAPKLARLHYSGSINAWSTKEPFSWIKVDLLAPMIIHGIKTQGARQKFSSLYISQFIIMYSLDGKKWQTYRGNSTGTLMVFFGNVDSSGIKHNIFNPPIIARYIRLHPTHYSIRSTLRMELMGCDLNSCSMPLGMESKAISDAQITASSYFTNMFATWSPSKARLHLQGRSNAWRPQVNNPKEWLQVDFQKTMKVTGVTTQGVKSLLTSMYVKEFLISSSQDGHQWTLFFQNGKVKVFQGNQDSFTPVVNSLDPPLLTRYLRIHPQSWVHQIALRMEVLGCEAQDLY

SEQ ID NO: 2863 - DNA, 4371 bp, synthetic construct
  misc_feature 1..4371: note = Variant of human B-domain deleted Factor VIII
  source 1..4371: mol_type = other DNA
atgcagattgaactgtctacctgcttcttcctctgtttgctgaggttctgctttagcgccactagacggtactaccttggcgctgtggagctgtcctgggactatatgcagagtgatttgggagagcttcccgtcgacgcacgatttcctcctcgcgttccaaagtcatttcccttcaacacaagcgtggtgtacaagaagacgctcttcgtcgaattcaccgatcacctgttcaatatcgccaaacccagaccaccatggatgggtcttttggggcctaccatacaagcggaggtgtatgacacagttgttatcactctcaagaacatggcttctcatccggtaagtcttcacgcagtgggcgtgtcctactggaaagcttcagaaggagccgagtatgatgatcagacatcccagagggagaaagaagacgacaaggtatttccaggtgggtctcatacctatgtgtggcaagtgctcaaagagaatggccctatggcaagcgatccgctctgtttgacttacagctacctttcacacgttgacctcgtcaaggacctcaactccgggttgattggagccttgttggtatgcagggaaggatctcttgccaaagagaagacacagaccctccacaagtttatccttctctttgctgtgttcgatgagggcaaaagttggcatagcgaaacgaagaattccctcatgcaggatcgcgacgcagccagcgccagagcttggcccaagatgcacactgtgaacggatatgtcaataggtcacttcctggcttgattgggtgtcatcggaaaagtgtctactggcacgtgatcggaatggggacaacaccagaggtccactccatatttctcgaaggccataccttccttgttcgaaaccacagacaggcatccttggagatctctcccattacctttctcactgcccaaacgctccttatggacttgggtcagttccttctcttctgccatatcagctcacaccagcatgatggtatggaagcttatgtgaaagtcgacagttgtcctgaggagccacagttgcgcatgaagaataatgaagaagccgaggattacgacgacgatctcaccgattctgagatggacgtggtgaggtttgatgacgacaactctccctccttcattcaaatccggagcgtggcgaagaaacaccccaagacttgggtccactatatagcggcggaagaggaggattgggattacgctcctcttgtattggcaccagatgaccgctcatacaaaagccagtacctcaacaacggaccgcagagaattggccggaagtataagaaagtgcgatttatggcctatacagacgaaacctttaagacaagggaggccatccagcatgagagtgggattttgggacctcttctttacggcgaagttggtgataccctcctcatcatcttcaagaatcaagcttctcgcccctataacatttacccacacgggatcactgacgttaggcctttgtatagcagaagacttcccaaaggcgtgaagcatctcaaagacttccccattttgccaggcgagatctttaagtacaaatggaccgtcacagtggaagatggaccgactaaatcagaccctcgatgccttacgcggtactattcctccttcgtgaatatggagagagatttggcaagcggactcataggaccactcctcatctgttacaaggaatctgtagaccagaggggtaaccagattatgagtgataaacgcaatgtgatcctttttagcgtcttcgacgagaaccggtcctggtacttgaccgagaatatacaaaggttccttcccaaccccgcaggcgttcagttggaagaccctgagtttcaggccagcaatattatgcactcaatcaacggctatgtgtttgatagtctccagctttctgtttgcctccatgaagtagcctattggtacatcttgtcaattggtgctcaaacagacttcctctccgtcttcttctccggctacacctttaagcacaagatggtgtatgaggacactctcacactctttccattttctggagaaaccgtgttcatgagcatggagaatccaggcctttggatcttgggttgccacaacagtgattttcgcaatcggggaatgactgctctcctcaaagtcagcagctgtgataagaacacaggcgactattacgaagattcttacgaggacataagtgcctacttgttgtccaagaataacgccattgagcccagatcattctcccagaatcctcccgtgcttaaaaggcatcagcgcgaaatcaccagaactactcttcagtctgatcaagaggagattgactatgacgacaccataagcgtggaaatgaagaaggaggatttcgatatctatgacgaagatgagaaccagtctccgcggagctttcagaagaagacgcgacactacttcattgcagcagtcgaaaggctttgggactacggtatgtcatcatcccctcatgtgttgcgcaatagagctcagagtggaagtgttccacagttcaagaaagtcgtctttcaagagtttacagatggcagcttcacacagcctctctatcggggcgagcttaacgaacatttgggactccttggtccctatatccgagccgaagtggaggacaacattatggttacctttaggaatcaagcctctcgcccctacagcttctactcctccctcatcagttatgaggaggatcagagacaaggcgctgaaccacggaagaactttgtgaaaccgaatgagacgaagacctacttctggaaagtacagcaccacatggcccccacaaaagacgaattcgattgcaaagcatgggcgtatttttcagacgttgacttggagaaagatgtacattcaggacttattggtcctttgttggtgtgtcacactaacactctcaatccagcccatggcaggcaggtgacagtccaggaattcgctcttttctttaccatctttgatgagaccaagtcctggtacttcacggaaaacatggagcgcaattgcagagccccctgtaacatacagatggaggaccctacctttaaggaaaattatcggttccacgcaatcaacggatacattatggatacactccctggccttgtgatggctcaggaccaacgaatcaggtggtacctcctcagcatgggttctaatgagaacatacactccattcacttttcaggacatgtgttcactgtccggaagaaagaagagtataagatggccctctacaatttgtatccaggcgtgtttgagaccgttgaaatgcttccctctaaagctggcatctggagagtagagtgcttgatcggagaacatcttcacgcaggtatgagcaccttgttcctcgtgtacagcaacaaatgtcagaccccacttggcatggccagtggacacattcgcgactttcagatcacagcatctggccagtatggacaatgggccccaaagttggctcgcctccattactccggtagcataaatgcgtggtccactaaagaacctttcagctggattaaggtcgatcttcttgcccccatgatcatccacggcattaagacacagggagcgaggcagaaattctcctccctctacatctcacagttcattattatgtatagtttggacggcaagaagtggcaaacttatagaggtaacagtactggaacactcatggtgttcttcggcaacgttgatagctctggcatcaaacacaacatctttaatcctcccataatagctcggtacatcagattgcatccgacccactacagcattaggagtacactccgaatggagcttatgggttgcgacttgaattcctgttcaatgccactcggaatggagtctaaagccatctctgatgcacagataaccgccagtagctactttacgaacatgtttgctacgtggtcaccctctaaggcaaggcttcatttgcaaggccggtctaatgcctggagacctcaggtgaacaacccgaaagaatggctccaggtggactttcagaagaccatgaaagtaacaggtgtcactactcagggagttaagtccttgcctaccagcatgtatgtgaaggagttccttatttcctcatcacaagatggccaccagtggaccctcttctttcagaatggtaaggtcaaagtgtttcagggcaatcaagacagcttcacacccgtggtgaacagtcttgatcctccactcttgacacgataccttcgaatccatccacagtcttgggttcaccagattgcattgcgcatggaagtacttggatgcgaggctcaggacctctac

SEQ ID NO: 2864 - protein, 1457 aa, synthetic construct
  REGION 1..1457: note = Variant of human B-domain deleted Factor VIII
MQIELSTCFFLCLLRFCFSATRRYYLGAVELSWDYMQSDLGELPVDARFPPRVPKSFPFNTSVVYKKTLFVEFTDHLFNIAKPRPPWMGLLGPTIQAEVYDTVVITLKNMASHPVSLHAVGVSYWKASEGAEYDDQTSQREKEDDKVFPGGSHTYVWQVLKENGPMASDPLCLTYSYLSHVDLVKDLNSGLIGALLVCREGSLAKEKTQTLHKFILLFAVFDEGKSWHSETKNSLMQDRDAASARAWPKMHTVNGYVNRSLPGLIGCHRKSVYWHVIGMGTTPEVHSIFLEGHTFLVRNHRQASLEISPITFLTAQTLLMDLGQFLLFCHISSHQHDGMEAYVKVDSCPEEPQLRMKNNEEAEDYDDDLTDSEMDVVRFDDDNSPSFIQIRSVAKKHPKTWVHYIAAEEEDWDYAPLVLAPDDRSYKSQYLNNGPQRIGRKYKKVRFMAYTDETFKTREAIQHESGILGPLLYGEVGDTLLIIFKNQASRPYNIYPHGITDVRPLYSRRLPKGVKHLKDFPILPGEIFKYKWTVTVEDGPTKSDPRCLTRYYSSFVNMERDLASGLIGPLLICYKESVDQRGNQIMSDKRNVILFSVFDENRSWYLTENIQRFLPNPAGVQLEDPEFQASNIMHSINGYVFDSLQLSVCLHEVAYWYILSIGAQTDFLSVFFSGYTFKHKMVYEDTLTLFPFSGETVFMSMENPGLWILGCHNSDFRNRGMTALLKVSSCDKNTGDYYEDSYEDISAYLLSKNNAIEPRSFSQNPPVLKRHQREITRTTLQSDQEEIDYDDTISVEMKKEDFDIYDEDENQSPRSFQKKTRHYFIAAVERLWDYGMSSSPHVLRNRAQSGSVPQFKKVVFQEFTDGSFTQPLYRGELNEHLGLLGPYIRAEVEDNIMVTFRNQASRPYSFYSSLISYEEDQRQGAEPRKNFVKPNETKTYFWKVQHHMAPTKDEFDCKAWAYFSDVDLEKDVHSGLIGPLLVCHTNTLNPAHGRQVTVQEFALFFTIFDETKSWYFTENMERNCRAPCNIQMEDPTFKENYRFHAINGYIMDTLPGLVMAQDQRIRWYLLSMGSNENIHSIHFSGHVFTVRKKEEYKMALYNLYPGVFETVEMLPSKAGIWRVECLIGEHLHAGMSTLFLVYSNKCQTPLGMASGHIRDFQITASGQYGQWAPKLARLHYSGSINAWSTKEPFSWIKVDLLAPMIIHGIKTQGARQKFSSLYISQFIIMYSLDGKKWQTYRGNSTGTLMVFFGNVDSSGIKHNIFNPPIIARYIRLHPTHYSIRSTLRMELMGCDLNSCSMPLGMESKAISDAQITASSYFTNMFATWSPSKARLHLQGRSNAWRPQVNNPKEWLQVDFQKTMKVTGVTTQGVKSLPTSMYVKEFLISSSQDGHQWTLFFQNGKVKVFQGNQDSFTPVVNSLDPPLLTRYLRIHPQSWVHQIALRMEVLGCEAQDLY

SEQ ID NO: 2865 - DNA, 4371 bp, synthetic construct
  misc_feature 1..4371: note = Variant of human B-domain deleted Factor VIII
  source 1..4371: mol_type = other DNA
atgcagattgaactgtctacctgcttcttcctctgtttgctgaggttctgctttagcgccactagacggtactaccttggcgctgtggagctgtcctgggactatatgcagagtgatttgggagagcttcccgtcgacgcacgatttcctcctcgcgttccaaagtcatttcccttcaacacaagcgtggtgtacaagaagacgctcttcgtcgaattcaccgatcacctgttcaatatcgccaaacccagaccaccatggatgggtcttttggggcctaccatacaagcggaggtgtatgacacagttgttatcactctcaagaacatggcttctcatccggtaagtcttcacgcagtgggcgtgtcctactggaaagcttcagaaggagccgagtatgatgatcagacatcccagagggagaaagaagacgacaaggtatttccaggtgggtctcatacctatgtgtggcaagtgctcaaagagaatggccctatggcaagcgatccgctctgtttgacttacagctacctttcacacgttgacctcgtcaaggacctcaactccgggttgattggagccttgttggtatgcagggaaggatctcttgccaaagagaagacacagaccctccacaagtttatccttctctttgctgtgttcgatgagggcaaaagttggcatagcgaaacgaagaattccctcatgcaggatcgcgacgcagccagcgccagagcttggcccaagatgcacactgtgaacggatatgtcaataggtcacttcctggcttgattgggtgtcatcggaaaagtgtctactggcacgtgatcggaatggggacaacaccagaggtccactccatatttctcgaaggccataccttccttgttcgaaaccacagacaggcatccttggagatctctcccattacctttctcactgcccaaacgctccttcgggacttgggtcagttccttctcttctgccatatcagctcacaccagcatgatggtatggaagcttatgtgaaagtcgacagttgtcctgaggagccacagttgcgcatgaagaataatgaagaagccgaggattacgacgacgatctcaccgattctgagatggacgtggtgaggtttgatgacgacaactctccctccttcattcaaatccggagcgtggcgaagaaacaccccaagacttgggtccactatatagcggcggaagaggaggattgggattacgctcctcttgtattggcaccagatgaccgctcatacaaaagccagtacctcaacaacggaccgcagagaattggccggaagtataagaaagtgcgatttatggcctatacagacgaaacctttaagacaagggaggccatccagcatgagagtgggattttgggacctcttctttacggcgaagttggtgataccctcctcatcatcttcaagaatcaagcttctcgcccctataacatttacccacacgggatcactgacgttaggcctttgtatagcagaagacttcccaaaggcgtgaagcatctcaaagacttccccattttgccaggcgagatctttaagtacaaatggaccgtcacagtggaagatggaccgactaaatcagaccctcgatgccttacgcggtactattcctccttcgtgaatatggagagagatttggcaagcggactcataggaccactcctcatctgttacaaggaatctgtagaccagaggggtaaccagattatgagtgataaacgcaatgtgatcctttttagcgtcttcgacgagaaccggtcctggtacttgaccgagaatatacaaaggttccttcccaaccccgcaggcgttcagttggaagaccctgagtttcaggccagcaatattatgcactcaatcaacggctatgtgtttgatagtctccagctttctgtttgcctccatgaagtagcctattggtacatcttgtcaattggtgctcaaacagacttcctctccgtcttcttctccggctacacctttaagcacaagatggtgtatgaggacactctcacactctttccattttctggagaaaccgtgttcatgagcatggagaatccaggcctttggatcttgggttgccacaacagtgattttcgcaatcggggaatgactgctctcctcaaagtcagcagctgtgataagaacacaggcgactattacgaagattcttacgaggacataagtgcctacttgttgtccaagaataacgccattgagcccagatcattctcccagaatcctcccgtgcttaaaaggcatcagcgcgaaatcaccagaactactcttcagtctgatcaagaggagattgactatgacgacaccataagcgtggaaatgaagaaggaggatttcgatatctatgacgaagatgagaaccagtctccgcggagctttcagaagaagacgcgacactacttcattgcagcagtcgaaaggctttgggactacggtatgtcatcatcccctcatgtgttgcgcaatagagctcagagtggaagtgttccacagttcaagaaagtcgtctttcaagagtttacagatggcagcttcacacagcctctctatcggggcgagcttaacgaacatttgggactccttggtccctatatccgagccgaagtggaggacaacattatggttacctttaggaatcaagcctctcgcccctacagcttctactcctccctcatcagttatgaggaggatcagagacaaggcgctgaaccacggaagaactttgtgaaaccgaatgagacgaagacctacttctggaaagtacagcaccacatggcccccacaaaagacgaattcgattgcaaagcatgggcgtatttttcagacgttgacttggagaaagatgtacattcaggacttattggtcctttgttggtgtgtcacactaacactctcaatccagcccatggcaggcaggtgacagtccaggaattcgctcttttctttaccatctttgatgagaccaagtcctggtacttcacggaaaacatggagcgcaattgcagagccccctgtaacatacagatggaggaccctacctttaaggaaaattatcggttccacgcaatcaacggatacattatggatacactccctggccttgtgatggctcaggaccaacgaatcaggtggtacctcctcagcatgggttctaatgagaacatacactccattcacttttcaggacatgtgttcactgtccggaagaaagaagagtataagatggccctctacaatttgtatccaggcgtgtttgagaccgttgaaatgcttccctctaaagctggcatctggagagtagagtgcttgatcggagaacatcttcacgcaggtatgagcaccttgttcctcgtgtacagcaacaaatgtcagaccccacttggcatggccagtggacacattcgcgactttcagatcacagcatctggccagtatggacaatgggccccaaagttggctcgcctccattactccggtagcataaatgcgtggtccactaaagaacctttcagctggattaaggtcgatcttcttgcccccatgatcatccacggcattaagacacagggagcgaggcagaaattctcctccctctacatctcacagttcattattatgtatagtttggacggcaagaagtggcaaacttatagaggtaacagtactggaacactcatggtgttcttcggcaacgttgatagctctggcatcaaacacaacatctttaatcctcccataatagctcggtacatcagattgcatccgacccactacagcattaggagtacactccgaatggagcttatgggttgcgacttgaattcctgttcaatgccactcggaatggagtctaaagccatctctgatgcacagataaccgccagtagctactttacgaacatgtttgctacgtggtcaccctctaaggcaaggcttcatttgcaaggccggtctaatgcctggagacctcaggtgaacaacccgaaagaatggctccaggtggactttcagaagaccatgaaagtaacaggtgtcactactcagggagttaagtccttgctcaccagcatgtatgtgaaggagttccttatttcatcatcacaagatggccaccagtggaccctcttctttcagaatggtaaggtcaaagtgtttcagggcaatcaagacagcttcacacccgtggtgaacagtcttgatcctccactcttgacacgataccttcgaatccatccacagtcttgggttcaccagattgcattgcgcatggaagtacttggatgcgaggctcaggacctctac

SEQ ID NO: 2866 - protein, 1457 aa, synthetic construct
  REGION 1..1457: note = Variant of human B-domain deleted Factor VIII
MQIELSTCFFLCLLRFCFSATRRYYLGAVELSWDYMQSDLGELPVDARFPPRVPKSFPFNTSVVYKKTLFVEFTDHLFNIAKPRPPWMGLLGPTIQAEVYDTVVITLKNMASHPVSLHAVGVSYWKASEGAEYDDQTSQREKEDDKVFPGGSHTYVWQVLKENGPMASDPLCLTYSYLSHVDLVKDLNSGLIGALLVCREGSLAKEKTQTLHKFILLFAVFDEGKSWHSETKNSLMQDRDAASARAWPKMHTVNGYVNRSLPGLIGCHRKSVYWHVIGMGTTPEVHSIFLEGHTFLVRNHRQASLEISPITFLTAQTLLRDLGQFLLFCHISSHQHDGMEAYVKVDSCPEEPQLRMKNNEEAEDYDDDLTDSEMDVVRFDDDNSPSFIQIRSVAKKHPKTWVHYIAAEEEDWDYAPLVLAPDDRSYKSQYLNNGPQRIGRKYKKVRFMAYTDETFKTREAIQHESGILGPLLYGEVGDTLLIIFKNQASRPYNIYPHGITDVRPLYSRRLPKGVKHLKDFPILPGEIFKYKWTVTVEDGPTKSDPRCLTRYYSSFVNMERDLASGLIGPLLICYKESVDQRGNQIMSDKRNVILFSVFDENRSWYLTENIQRFLPNPAGVQLEDPEFQASNIMHSINGYVFDSLQLSVCLHEVAYWYILSIGAQTDFLSVFFSGYTFKHKMVYEDTLTLFPFSGETVFMSMENPGLWILGCHNSDFRNRGMTALLKVSSCDKNTGDYYEDSYEDISAYLLSKNNAIEPRSFSQNPPVLKRHQREITRTTLQSDQEEIDYDDTISVEMKKEDFDIYDEDENQSPRSFQKKTRHYFIAAVERLWDYGMSSSPHVLRNRAQSGSVPQFKKVVFQEFTDGSFTQPLYRGELNEHLGLLGPYIRAEVEDNIMVTFRNQASRPYSFYSSLISYEEDQRQGAEPRKNFVKPNETKTYFWKVQHHMAPTKDEFDCKAWAYFSDVDLEKDVHSGLIGPLLVCHTNTLNPAHGRQVTVQEFALFFTIFDETKSWYFTENMERNCRAPCNIQMEDPTFKENYRFHAINGYIMDTLPGLVMAQDQRIRWYLLSMGSNENIHSIHFSGHVFTVRKKEEYKMALYNLYPGVFETVEMLPSKAGIWRVECLIGEHLHAGMSTLFLVYSNKCQTPLGMASGHIRDFQITASGQYGQWAPKLARLHYSGSINAWSTKEPFSWIKVDLLAPMIIHGIKTQGARQKFSSLYISQFIIMYSLDGKKWQTYRGNSTGTLMVFFGNVDSSGIKHNIFNPPIIARYIRLHPTHYSIRSTLRMELMGCDLNSCSMPLGMESKAISDAQITASSYFTNMFATWSPSKARLHLQGRSNAWRPQVNNPKEWLQVDFQKTMKVTGVTTQGVKSLLTSMYVKEFLISSSQDGHQWTLFFQNGKVKVFQGNQDSFTPVVNSLDPPLLTRYLRIHPQSWVHQIALRMEVLGCEAQDLY

SEQ ID NO: 2867 - DNA, 4371 bp, synthetic construct
  misc_feature 1..4371: note = Variant of human B-domain deleted Factor VIII
  source 1..4371: mol_type = other DNA
atgcagattgaactgtctacctgcttcttcctctgtttgctgaggttctgctttagcgccactagacggtactaccttggcgctgtggagctgtcctgggactatatgcagagtgatttgggagagcttcccgtcgacgcacgatttcctcctcgcgttccaaagtcatttcccttcaacacaagcgtggtgtacaagaagacgctcttcgtcgaattcaccgatcacctgttcaatatcgccaaacccagaccaccatggatgggtcttttggggcctaccatacaagcggaggtgtatgacacagttgttatcactctcaagaacatggcttctcatccggtaagtcttcacgcagtgggcgtgtcctactggaaagcttcagaaggagccgagtatgatgatcagacatcccagagggagaaagaagacgacaaggtatttccaggtgggtctcatacctatgtgtggcaagtgctcaaagagaatggccctatggcaagcgatccgctctgtttgacttacagctacctttcacacgttgacctcgtcaaggacctcaactccgggttgattggagccttgttggtatgcagggaaggatctcttgccaaagagaagacacagaccctccacaagtttatccttctctttgctgtgttcgatgagggcaaaagttggcatagcgaaacgaagaattccctcatgcaggatcgcgacgcagccagcgccagagcttggcccaagatgcacactgtgaacggatatgtcaataggtcacttcctggcttgattgggtgtcatcggaaaagtgtctactggcacgtgatcggaatggggacaacaccagaggtccactccatatttctcgaaggccataccttccttgttcgaaaccacagacaggcatccttggagatctctcccattacctttctcactgcccaaacgctccttatggacttgggtcagttccttctcttctgccatatcagctcacaccagcatgatggtatggaagcttatgtgaaagtcgacagttgtcctgaggagccacagttgcgcatgaagaataatgaagaagccgaggattacgacgacgatctcaccgattctgagatggacgtggtgaggtttgatgacgacaactctccctccttcattcaaatccggagcgtggcgaagaaacaccccaagacttgggtccactatatagcggcggaagaggaggattgggattacgctcctcttgtattggcaccagatgaccgctcatacaaaagccagtacctcaacaacggaccgcagagaattggccggaagtataagaaagtgcgatttatggcctatacagacgaaacctttaagacaagggaggccatccagcatgagagtgggattttgggacctcttctttacggcgaagttggtgataccctcctcatcatcttcaagaatcaagcttctcgcccctataacatttacccacacgggatcactgacgttaggcctttgtatagcagaagacttcccaaaggcgtgaagcatctcaaagacttccccattttgccaggcgagatctttaagtacaaatggaccgtcacagtggaagatggaccgactaaatcagaccctcgatgccttacgcggtactattcctccttcgtgaatatggagagagatttggcaagcggactcataggaccactcctcatctgttacaaggaatctgtagaccagaggggtaaccagattatgagtgataaacgcaatgtgatcctttttagcgtcttcgacgagaaccggtcctggtacttgaccgagaatatacaaaggttccttcccaaccccgcaggcgttcagttggaagaccctgagtttcaggccagcaatattatgcactcaatcaacggctatgtgtttgatagtctccagctttctgtttgcctccatgaagtagcctattggtacatcttgtcaattggtgctcaaacagacttcctctccgtcttcttctccggctacacctttaagcacaagatggtgtatgaggacactctcacactctttccattttctggagaaaccgtgttcatgagcatggagaatccaggcctttggatcttgggttgccacaacagtgattttcgcaatcggggaatgactgctctcctcaaagtcagcagctgtgataagaacacaggcgactattacgaagattcttacgaggacataagtgcctacttgttgtccaagaataacgccattgagcccagatcattctcccagaatcctcccgtgcttaaaaggcatcagcgcgaaatcaccagaactactcttcagtctgatcaagaggagattgactatgacgacaccataagcgtggaaatgaagaaggaggatttcgatatctatgacgaagatgagaaccagtctccgcggagctttcagaagaagacgcgacactacttcattgcagcagtcgaaaggctttgggactacggtatgtcatcatcccctcatgtgttgcgcaatagagctcagagtggaagtgttccacagttcaagaaagtcgtctttcaagagtttacagatggcagcttcacacagcctctctatcggggcgagcttaacgaacatttgggactccttggtccctatatccgagccgaagtggaggacaacattatggttacctttaggaatcaagcctctcgcccctacagcttctactcctccctcatcagttatgaggaggatcagagacaaggcgctgaaccacggaagaactttgtgaaaccgaatgagacgaagacctacttctggaaagtacagcaccacatggcccccacaaaagacgaattcgattgcaaagcatgggcgtatttttcagacgttgacttggagaaagatgtacattcaggacttattggtcctttgttggtgtgtcacactaacactctcaatccagcccatggcaggcaggtgacagtccaggaattcgctcttttctttaccatctttgatgagaccaagtcctggtacttcacggaaaacatggagcgcaattgcagagccccctgtaacatacagatggaggaccctacctttaaggaaaattatcggttccacgcaatcaacggatacattatggatacactccctggccttgtgatggctcaggaccaacgaatcaggtggtacctcctcagcatgggttctaatgagaacatacactccattcacttttcaggacatgtgttcactgtccggaagaaagaagagtataagatggccctctacaatttgtatccaggcgtgtttgagaccgttgaaatgcttccctctaaagctggcatctggagagtagagtgcttgatcggagaacatcttcacgcaggtatgagcaccttgttcctcgtgtacagcaacaaatgtcagaccccacttggcatggccagtggacacattcgcgactttcagatcacagcatctggccagtatggacaatgggccccaaagttggctcgcctccattactccggtagcataaatgcgtggtccactaaagaacctttcagctggattaaggtcgatcttcttgcccccatgatcatccacggcattaagacacagggagcgaggcagaaattctcctccctctacatctcacagttcattattatgtatagtttggacggcaagaagtggcaaacttatagaggtaacagtactggaacactcatggtgttcttcggcaacgttgatagctctggcatcaaacacaacatctttaatcctcccataatagctcggtacatcagattgcatccgacccactacagcattaggagtacactccgaatggagcttatgggttgcgacttgaattcctgttcaatgccactcggaatggagtctaaagccatctctgatgcacagataaccgccagtagctactttacgaacatgtttgctacgtggtcaccctctaaggcaaggcttcatttgcaaggccggtctaatgcctggagacctcaggtgaacaacccgaaagaatggctccaggtggactttcagaagaccatgaaagtaacaggtgtcactactcagggagttaagtccttgactaccagcatgtatgtgaaggagttccttatttcctcatcacaagatggccaccagtggaccctcttctttcagaatggtaaggtcaaagtgtttcagggcaatcaagacagcttcacacccgtggtgaacagtcttgatcctccactcttgacacgataccttcgaatccatccacagtcttgggttcaccagattgcattgcgcatggaagtacttggatgcgaggctcaggacctctac

SEQ ID NO: 2868 - protein, 1457 aa, synthetic construct
  REGION 1..1457: note = Variant of human B-domain deleted Factor VIII
MQIELSTCFFLCLLRFCFSATRRYYLGAVELSWDYMQSDLGELPVDARFPPRVPKSFPFNTSVVYKKTLFVEFTDHLFNIAKPRPPWMGLLGPTIQAEVYDTVVITLKNMASHPVSLHAVGVSYWKASEGAEYDDQTSQREKEDDKVFPGGSHTYVWQVLKENGPMASDPLCLTYSYLSHVDLVKDLNSGLIGALLVCREGSLAKEKTQTLHKFILLFAVFDEGKSWHSETKNSLMQDRDAASARAWPKMHTVNGYVNRSLPGLIGCHRKSVYWHVIGMGTTPEVHSIFLEGHTFLVRNHRQASLEISPITFLTAQTLLMDLGQFLLFCHISSHQHDGMEAYVKVDSCPEEPQLRMKNNEEAEDYDDDLTDSEMDVVRFDDDNSPSFIQIRSVAKKHPKTWVHYIAAEEEDWDYAPLVLAPDDRSYKSQYLNNGPQRIGRKYKKVRFMAYTDETFKTREAIQHESGILGPLLYGEVGDTLLIIFKNQASRPYNIYPHGITDVRPLYSRRLPKGVKHLKDFPILPGEIFKYKWTVTVEDGPTKSDPRCLTRYYSSFVNMERDLASGLIGPLLICYKESVDQRGNQIMSDKRNVILFSVFDENRSWYLTENIQRFLPNPAGVQLEDPEFQASNIMHSINGYVFDSLQLSVCLHEVAYWYILSIGAQTDFLSVFFSGYTFKHKMVYEDTLTLFPFSGETVFMSMENPGLWILGCHNSDFRNRGMTALLKVSSCDKNTGDYYEDSYEDISAYLLSKNNAIEPRSFSQNPPVLKRHQREITRTTLQSDQEEIDYDDTISVEMKKEDFDIYDEDENQSPRSFQKKTRHYFIAAVERLWDYGMSSSPHVLRNRAQSGSVPQFKKVVFQEFTDGSFTQPLYRGELNEHLGLLGPYIRAEVEDNIMVTFRNQASRPYSFYSSLISYEEDQRQGAEPRKNFVKPNETKTYFWKVQHHMAPTKDEFDCKAWAYFSDVDLEKDVHSGLIGPLLVCHTNTLNPAHGRQVTVQEFALFFTIFDETKSWYFTENMERNCRAPCNIQMEDPTFKENYRFHAINGYIMDTLPGLVMAQDQRIRWYLLSMGSNENIHSIHFSGHVFTVRKKEEYKMALYNLYPGVFETVEMLPSKAGIWRVECLIGEHLHAGMSTLFLVYSNKCQTPLGMASGHIRDFQITASGQYGQWAPKLARLHYSGSINAWSTKEPFSWIKVDLLAPMIIHGIKTQGARQKFSSLYISQFIIMYSLDGKKWQTYRGNSTGTLMVFFGNVDSSGIKHNIFNPPIIARYIRLHPTHYSIRSTLRMELMGCDLNSCSMPLGMESKAISDAQITASSYFTNMFATWSPSKARLHLQGRSNAWRPQVNNPKEWLQVDFQKTMKVTGVTTQGVKSLTTSMYVKEFLISSSQDGHQWTLFFQNGKVKVFQGNQDSFTPVVNSLDPPLLTRYLRIHPQSWVHQIALRMEVLGCEAQDLY

SEQ ID NO: 2869 - DNA, 4371 bp, synthetic construct
  misc_feature 1..4371: note = Variant of human B-domain deleted Factor VIII
  source 1..4371: mol_type = other DNA
atgcagattgaactgtctacctgcttcttcctctgtttgctgaggttctgctttagcgccactagacggtactaccttggcgctgtggagctgtcctgggactatatgcagagtgatttgggagagcttcccgtcgacgcacgatttcctcctcgcgttccaaagtcatttcccttcaacacaagcgtggtgtacaagaagacgctcttcgtcgaattcaccgatcacctgttcaatatcgccaaacccagaccaccatggatgggtcttttggggcctaccatacaagcggaggtgtatgacacagttgttatcactctcaagaacatggcttctcatccggtaagtcttcacgcagtgggcgtgtcctactggaaagcttcagaaggagccgagtatgatgatcagacatcccagagggagaaagaagacgacaaggtatttccaggtgggtctcatacctatgtgtggcaagtgctcaaagagaatggccctatggcaagcgatccgctctgtttgacttacagctacctttcacacgttgacctcgtcaaggacctcaactccgggttgattggagccttgttggtatgcagggaaggatctcttgccaaagagaagacacagaccctccacaagtttatccttctctttgctgtgttcgatgagggcaaaagttggcatagcgaaacgaagaattccctcatgcaggatcgcgacgcagccagcgccagagcttggcccaagatgcacactgtgaacggatatgtcaataggtcacttcctggcttgattgggtgtcatcggaaaagtgtctactggcacgtgatcggaatggggacaacaccagaggtccactccatatttctcgaaggccataccttccttgttcgaaaccacagacaggcatccttggagatctctcccattacctttctcactgcccaaacgctccttatggacttgggtcagttccttctcttctgccatatcagctcacaccagcatgatggtatggaagcttatgtgaaagtcgacagttgtcctgaggagccacagttgcgcatgaagaataatgaagaagccgaggattacgacgacgatctcaccgattctgagatggacgtggtgaggtttgatgacgacaactctccctccttcattcaaatccggagcgtggcgaagaaacaccccaagacttgggtccactatatagcggcggaagaggaggattgggattacgctcctcttgtattggcaccagatgaccgctcatacaaaagccagtacctcaacaacggaccgcagagaattggccggaagtataagaaagtgcgatttatggcctatacagacgaaacctttaagacaagggaggccatccagcatgagagtgggattttgggacctcttctttacggcgaagttggtgataccctcctcatcatcttcaagaatcaagcttctcgcccctataacatttacccacacgggatcactgacgttaggcctttgtatagcagaagacttcccaaaggcgtgaagcatctcaaagacttccccattttgccaggcgagatctttaagtacaaatggaccgtcacagtggaagatggaccgactaaatcagaccctcgatgccttacgcggtactattcctccttcgtgaatatggagagagatttggcaagcggactcataggaccactcctcatctgttacaaggaatctgtagaccagaggggtaaccagattatgagtgataaacgcaatgtgatcctttttagcgtcttcgacgagaaccggtcctggtacttgaccgagaatatacaaaggttccttcccaaccccgcaggcgttcagttggaagaccctgagtttcaggccagcaatattatgcactcaatcaacggctatgtgtttgatagtctccagctttctgtttgcctccatgaagtagcctattggtacatcttgtcaattggtgctcaaacagacttcctctccgtcttcttctccggctacacctttaagcacaagatggtgtatgaggacactctcacactctttccattttctggagaaaccgtgttcatgagcatggagaatccaggcctttggatcttgggttgccacaacagtgattttcgcaatcggggaatgactgctctcctcaaagtcagcagctgtgataagaacacaggcgactattacgaagattcttacgaggacataagtgcctacttgttgtccaagaataacgccattgagcccagatcattctcccagaatcctcccgtgcttaaaaggcatcagcgcgaaatcaccagaactactcttcagtctgatcaagaggagattgactatgacgacaccataagcgtggaaatgaagaaggaggatttcgatatctatgacgaagatgagaaccagtctccgcggagctttcagaagaagacgcgacactacttcattgcagcagtcgaaaggctttgggactacggtatgtcatcatcccctcatgtgttgcgcaatagagctcagagtggaagtgttccacagttcaagaaagtcgtctttcaagagtttacagatggcagcttcacacagcctctctatcggggcgagcttaacgaacatttgggactccttggtccctatatccgagccgaagtggaggacaacattatggttacctttaggaatcaagcctctcgcccctacagcttctactcctccctcatcagttatgaggaggatcagagacaaggcgctgaaccacggaagaactttgtgaaaccgaatgagacgaagacctacttctggaaagtacagcaccacatggcccccacaaaagacgaattcgattgcaaagcatgggcgtatttttcagacgttgacttggagaaagatgtacattcaggacttattggtcctttgttggtgtgtcacactaacactctcaatccagcccatggcaggcaggtgacagtccaggaattcgctcttttctttaccatctttgatgagaccaagtcctggtacttcacggaaaacatggagcgcaattgcagagccccctgtaacatacagatggaggaccctacctttaaggaaaattatcggttccacgcaatcaacggatacattatggatacactccctggccttgtgatggctcaggaccaacgaatcaggtggtacctcctcagcatgggttctaatgagaacatacactccattcacttttcaggacatgtgttcactgtccggaagaaagaagagtataagatggccctctacaatttgtatccaggcgtgtttgagaccgttgaaatgcttccctctaaagctggcatctggagagtagagtgcttgatcggagaacatcttcacgcaggtatgagcaccttgttcctcgtgtacagcaacaaatgtcagaccccacttggcatggccagtggacacattcgcgactttcagatcacagcatctggccagtatggacaatgggccccaaagttggctcgcctccattactccggtagcataaatgcgtggtccactaaagaacctttcagctggattaaggtcgatcttcttgcccccatgatcatccacggcattaagacacagggagcgaggcagaaattctcctccctctacatctcacagttcattattatgtatagtttggacggcaagaagtggcaaacttatagaggtaacagtactggaacactcatggtgttcttcggcaacgttgatagctctggcatcaaacacaacatctttaatcctcccataatagctcggtacatcagattgcatccgacccactacagcattaggagtacactccgaatggagcttatgggttgcgacttgaattcctgttcaatgccactcggaatggagtctaaagccatctctgatgcacagataaccgccagtagctactttacgaacatgtttgctacgtggtcaccctctaaggcaaggcttcatttgcaaggccggtctaatgcctggagacctcaggtgaacaacccgaaagaatggctccaggtggactttcagaagaccatgaaagtaacaggtgtcactactcagggagttaagtccttgcataccagcatgtatgtgaaggagttccttatttcctcatcacaagatggccaccagtggaccctcttctttcagaatggtaaggtcaaagtgtttcagggcaatcaagacagcttcacacccgtggtgaacagtcttgatcctccactcttgacacgataccttcgaatccatccacagtcttgggttcaccagattgcattgcgcatggaagtacttggatgcgaggctcaggacctctac

SEQ ID NO: 2870 - protein, 1457 aa, synthetic construct
  REGION 1..1457: note = Variant of human B-domain deleted Factor VIII
MQIELSTCFFLCLLRFCFSATRRYYLGAVELSWDYMQSDLGELPVDARFPPRVPKSFPFNTSVVYKKTLFVEFTDHLFNIAKPRPPWMGLLGPTIQAEVYDTVVITLKNMASHPVSLHAVGVSYWKASEGAEYDDQTSQREKEDDKVFPGGSHTYVWQVLKENGPMASDPLCLTYSYLSHVDLVKDLNSGLIGALLVCREGSLAKEKTQTLHKFILLFAVFDEGKSWHSETKNSLMQDRDAASARAWPKMHTVNGYVNRSLPGLIGCHRKSVYWHVIGMGTTPEVHSIFLEGHTFLVRNHRQASLEISPITFLTAQTLLMDLGQFLLFCHISSHQHDGMEAYVKVDSCPEEPQLRMKNNEEAEDYDDDLTDSEMDVVRFDDDNSPSFIQIRSVAKKHPKTWVHYIAAEEEDWDYAPLVLAPDDRSYKSQYLNNGPQRIGRKYKKVRFMAYTDETFKTREAIQHESGILGPLLYGEVGDTLLIIFKNQASRPYNIYPHGITDVRPLYSRRLPKGVKHLKDFPILPGEIFKYKWTVTVEDGPTKSDPRCLTRYYSSFVNMERDLASGLIGPLLICYKESVDQRGNQIMSDKRNVILFSVFDENRSWYLTENIQRFLPNPAGVQLEDPEFQASNIMHSINGYVFDSLQLSVCLHEVAYWYILSIGAQTDFLSVFFSGYTFKHKMVYEDTLTLFPFSGETVFMSMENPGLWILGCHNSDFRNRGMTALLKVSSCDKNTGDYYEDSYEDISAYLLSKNNAIEPRSFSQNPPVLKRHQREITRTTLQSDQEEIDYDDTISVEMKKEDFDIYDEDENQSPRSFQKKTRHYFIAAVERLWDYGMSSSPHVLRNRAQSGSVPQFKKVVFQEFTDGSFTQPLYRGELNEHLGLLGPYIRAEVEDNIMVTFRNQASRPYSFYSSLISYEEDQRQGAEPRKNFVKPNETKTYFWKVQHHMAPTKDEFDCKAWAYFSDVDLEKDVHSGLIGPLLVCHTNTLNPAHGRQVTVQEFALFFTIFDETKSWYFTENMERNCRAPCNIQMEDPTFKENYRFHAINGYIMDTLPGLVMAQDQRIRWYLLSMGSNENIHSIHFSGHVFTVRKKEEYKMALYNLYPGVFETVEMLPSKAGIWRVECLIGEHLHAGMSTLFLVYSNKCQTPLGMASGHIRDFQITASGQYGQWAPKLARLHYSGSINAWSTKEPFSWIKVDLLAPMIIHGIKTQGARQKFSSLYISQFIIMYSLDGKKWQTYRGNSTGTLMVFFGNVDSSGIKHNIFNPPIIARYIRLHPTHYSIRSTLRMELMGCDLNSCSMPLGMESKAISDAQITASSYFTNMFATWSPSKARLHLQGRSNAWRPQVNNPKEWLQVDFQKTMKVTGVTTQGVKSLHTSMYVKEFLISSSQDGHQWTLFFQNGKVKVFQGNQDSFTPVVNSLDPPLLTRYLRIHPQSWVHQIALRMEVLGCEAQDLY
